United States Patent Application Publication US 2026/0058010 A1 - sequence listing, part 28

SEQ ID NO: 341 - DNA, 753838 bp, Homo sapiens
  source 1..753838: mol_type = genomic DNA
atgacagcatctcagggacttgattggttatatttcagtaagaaacagtatgtcagggaggaaaatcttaatttctggaggcaatgcatcttaaaccagccctcagttactgtacatggaccaagcacagcccatccagccgcatctactcactgtgcagacgcactgctccctctgttgtggttcccttatttccagccccaaaacacctctactttcacttagctggctttttcttagctggcttacatttatgtaaagtaatagcctttttaaggagttagttaaaattgaataagtaaatattgaataaactgtaaatgttattactgaacagattctgtcattaagaagcccatgtgttgatgccagccttatttgtttcatgaagtattgtttcttttaatatttattttttaaattttaattattattattattattttttgagatgcagtctcactctgtcgcctaggctggagtgcagtggcacaatctgagttcactgcaacctccgcctcccaggctcaagcaattctcctgcctctgcctcctgagtagctgggattaacaggcgcctaccaccaagcctggctactttttgtatttttagtagggacagggtttccccatgttagccaggcttgtctcgaactcctgacctcaagtgatccgcctgcctcggcctcctaaagtgctgggattacaggcgtgagccaatgcacccggccaacttatgtttcaattaattttcgttagtcgtaagtttttaaaacaataaaggtagtggagatactgatttttttttccttttaggtttcaagaggagctttgctttaggcttgttaagcatagggtggttgaagtatcatttgtgtggcacgacttaggtattggtattttcttttaccattgttcacttaagaagttttcaaagagtaatattcacaagttaatgaggacattaacaaacaaacagtgaagatgttcatcagttaattaatttatcagcaacttgggtatttctttgattctaaaatgtactttccctcccccacatttcaccgtcgtctatttattttcttaatgatggatctcagatgaagtggtacataaagttccttgctaggcatttgtaagattcaggtctaggtcatttgtgtgagtctcagtaagaaagaggagagatctggccaaagaaagctcattttcctgttttcagtcaggaggatctctcacattggttattgatcaaaaactaggactgaatcagagtttgacattttctttctttgtgaatcattattttattaatgatgtttaaaatttaggagcaaaaaaggcatttccaacaattcaattacagatgccattttattcagctttttctgtcaaactgaattgttcattccaaatccttgcttttagagaagagctgagtgtgtaggaaaaaaagagggaccacttgaagtctgttgcaagagaaatagagatcaaagttcacaacatacaaagaatttatttatgcaatacaggccttttctcaaatatttttcacagaattccacacagtaatctactagaaaagtagaattatacaccaccaaataacattgtttcgtttcttagtacaaattgctaatcaaaaggaaggtggagatgatagtttaataacaaatagtaaaacaggtgttgctgaatacagcacccggtagcctctatttgcaaacccggggagggaagggggtgccccaacaaaacaacagtggctccgcctcattgtccaggcacaggcaaaccgcagtagtgagctttggtacttgcatttactttaaaagaaaaacaaatgttgtgagctcaagagcatttccatcatttcgttttgttgtgctatgaagatgacagatcaggaaaaaatggtaactatttcacacttgctataaattagattccttgtgctaaccacacaataaaatagcctcccccaaaccatacttttctaggtctaaaacatgcttgaagaacaatattgatagacagacttaattgagatgttttaaattacatttaccataatttaaacattactatttaaatcccagaaatattagtgctgaagaagcacagttgtttggaaaaatacaggacccaaattacagcatcaaattttcctattccaatattgtaacccacttccccactgtgaaaatcctatttctcaagcttgtagatgcatgggaaatgttcttcataatattatagctggaataagtggtttacttgctccactgtatgtttccataattggtgaaaatagacttctcattatgactaaaaatatagattttttaaaactacagaacccagcagccagttttctgctttgctaatcccccccaaaaaagtcaagcaaagactacaaaaatagcaattattaataactttaaaaaatattttgcttctttgagcaaatttaagttacattcagatgtggtagaagagaatgatgctccaggtacttctgctcatcctaggggcagagttgatgtacagctgtcaccatcagtagcgggtttggtattcatgatgccaccggttaaagtcgttgtaaaatagcacaatgcttcctgaagccatgccagaaatgatgcacctaggagaagcacagagagaaggacttttacaaacctgtgtgtcctagagatgttactaaaaactgctctccccaaatccacaaggtaaatatagaagctggcagtgaaggctccaatttgtgggaactaaggtatgtatttcatgactaaaatgtatccctgagtaagctcagagtactgcctctgacactccacaaggatccaagccacagcttgctttttcattgaaagggtacggacagctggtatgtgcaggatgagtaactaaaatctgaacagatttgtaactaaaatctgaacagatttggtaatttctaaagggggactgggctggcaagacccatccattatataagcaacagactcaaaagaaggaaccacaatctcaaagtaactgctggtggaaagaagcagcacacactcaagtgacaagagacaccacctctgacaggtacagaatcaatgaagagtgaaaaagaagagtgttgttgaccataatttaagctggtctcccctctgtggagaagtagtctatgtccatcatgctctgggtgaggacctagtcctcgtaacacagtaactcaccgaaatcactgaagataagaacttctgcaagcttcttggtctcctgtccccaaagaggtggtgcagggaaagagatggagaacataggtgaacctaaactgagcatagccagatttttctctgtgtagtttggttaggaccagcccttagaagccatattcagtatccttcctagtacctcgtatcaaaattaattaggaactaaaatgtgtcactacaaaaaaaatcaactaaaaacaaaggaagacagtaaggaggaaatgagagacaaaactctaaggcagagagaaaattaaatagaaaagtggcaaaagtcagtctttccttatcagtcattaaagagattaaattctccagccaaaaggaagagattggcagaatggataaaaaacatgatccaactatatgctgtctacaggagacccacttgagatctaaagacaaacatcttgaaagtgaaaggatggaaaagatattccgtgtaagtactagcaaagagagctgaggtggcttacactaatatcagacaaaatagtctttcagtcaaaaactgttacaagagacaaaggacactacactgagaaaagggtaaattcacagaaatataacaattatatatgcatttatcatcagacccccaagatacaaagagcaaatattaacagaattgaagggagaaatggttctacagtaatagttttagacgtcaataccccactttcaataatgggtggaacaaccaggtggaagataaggaaacaggacacttgaacaatacgataagccaactggacctgacacacgtatatagaacaccttcccaacaacaatagaatatacatttttttgcagtgcgcatggaatagtctccaagataaaccatatgttaggccacaagtgttaatgacttagtaaagattaaaatcacaaagtagcttttctgatcataatagaatgaaactaggtaccaataactgaaggtaaactagaaaattcacaaatatgtggaaagtaaataaatgatgagtcaaaaaaaacaaacaacaacataagagacatcagaaaatactgagacaaatgaaaaggaaatacaacaagccaaaacttatgaaatgcagcaaaagcaatgctaaaatggaaatttttagctgtaaacacatagatttaaaaatatctcaaatcaataacctaactttacctcttaaggaactagaaaacagacaaaaccccaggctaggcagaaggaagaaaataataaagaacagagtagagagaaataaagcagaaaatagtaaaatgattgataggaaaaaacccaaaaattggttctttgaaaaaataacaaaattgacaaacctctagctagactaagatgacttggctgggcatggtggatcatgcctgtaatcccagcactttgggaggccaaggtgggtggatcacctggggtcaggagttcgagaccagcctggccaacccggggaaacctcgtctctactaaaaatacaaaaattaactgggcgtggtagtgggcacctgtaatcccagctacttggaaggctgaggcaggagaatcacttgaacctgggaagcagaggttgcagtgagctgagattgcaccattgcactccagcctgggtgatagagtgagactccatctcaaaaaaaaaaaaaaaatgactcaaattactaaaatcagaaataaaagttgggacattactgatttggcagaaactgagttcagagagactattagaaacaactgtataccaacaaatagggcaacctagatgaaatagacaaattcctgaaaacagtataccaaaactgaatgaagaaatagaaatgattagacttatgacaagtgaagagattgaatcagtaatcaaaaacctcccaataagaaaagtcctagacaagatggcttcactgatgaattctaccaaacatttaaagaagtattaacaccaatccttctcaatttcttcttccaaaaaattaaagaatccagaacacttcctaagtgattcaataaggccagtattaccatgacaccaaagccagttgaagacattacaacaaaagaacacacagaccaggatacaaaatactagcaaactgaattcactagcatggtagtgggaatgtacaccatgacccagtgggattcattctgggaatgcaaggatgactcaccatgcaaaagtcaaccaacatataacatactacattaacagaacaaacaacaaaacaagcccacatgatcatctcaactgatgctggaaaatttgacatgtgacaaaattcatcatccttttattatgaaaacaataggagtagaaggaaactacctcaaatgataaacagcatgtatgaataactcacagctaacaccacactcgatgaaaaaaagtttttcccctatgattgggaacaaggcaaggatgcccactttaatcactcttatccaacagtactgaaagtcctagacagagcaattacacaagaaaaaagtatccaaattggaaaggaggagtgaaactgtctctgtttacagatgacatgatcttgtatgtaggaaatcctaaaaattccacaccaaaacaaaacaaaagagctaataaatgaattcagcaaatttgcaggatatacaacacgaaaatcagttgcatttttatacactaacaaacaatgagcagtccaaaaggaaaattaagaattgcagtgagccgagatcatgccattgcactccagcctgggtgacagagcgaaacagaaacccctaacagccaaaacaatcttgaaaaagaagaaatatgttagcagttgcacattttctgatttgaaaacttacttactgttgttacaatgcgacagtaatcaaaacattgtcacactgatataggcagaccaacagaagagaaagttgagaaataatccctcacatatgtgctcaaatagggtgccaagacctttcaacggagaaagcaccttcttttcaacaaattatgctgggaaaataggatgtccacatgcaaaacaatgaaggtggactcttacctaccattatattaaaaaactaaaaacagatcaaaaacctaaatacaaattaaaactataaaacttttagatgaaaacatatgggaaaaccttcatgaccttggattttgcagtggcttcttggatatgatatcaaaacaaaagagacaagataacaaaacaaactcataacaaaaaataggacttcataaaatgtaaaatcagggctaggtatagtggcttatggctataatcccatccctttgggtggctgagtcagcaggattgtttgtttgagcccaggagtttaagaccagcctgggcaacatagtgagaccctgtctctacagaaaataaaaaagctgggcatggtggcacatgcctggagtaccagctaccatgtagctgaggcgggagaatcatttgagcccaggaggttgaggcttcagtgagctgtgattgtgccactgcactccagtctgggcaaaagagtgagaccctgtctcaaaaaacaaacaaaaagtaaaatcttttgagcatctaaggatattaggaagagagtgaaaagacaacatcactgatcattagggaaatcaaaaccacaatgagagaccacgcctgttaggacaactgttaaaaaatagagcaaggtgttgataaggatgtggagaaattggaacccatgtaaaatggtacagccactgtggaaaacactttagggtttcctcaaaaagtcaaacggaattgccatataacccagcaattccactcctgggcatacacccaaaaggactgtaaaaagggacttgaatagatatttgtatgataatgttcatagcagcattactcaccatagccaaaaggtagaaacaacccaagtgtccatcatcaacaggtgaacgataaacagaacacagaatattcatataatattctgatacgtgctacgacatgcaagaaccttgaaagtgttatgccaagtgaaataagccaggcacaacacaacaaatattgtatgattccacttaacagaaggtgcttagaagaggcaaattcatagagacagaaagtagcatgcacatgagctggtgggagagagagtcattaacatgcagagcttctgtttatgatgaaaagggtctggaaatggatgatggtgatggtggcacaacactgtaaatgtacataatgccactaaattatatatcgaaaagagtttagatggaaaatattatatgttgccacaattttttttaaaaggaacaaaaatgagtgactatacgttaagaggaaataaggtgccagataaagatgatccccccaaaatctaccacttgagagcttttaggaaataagccctatctttcaggggactctccatatgcagagatatgcagagataaaggcattttacattaaacatctttacagctctttcaattttatttactgataaagatgatgatacttcttcaggctggcaatcgccgaataggagcagatctggtctgcagctcccagtgagattgacgctgggtggatgatttctgcatttccaactgaggtacctggttcatctcgttgggactggttggacagtgggtgcagcccacggagggcaagccgaagcagggtggggtgttgcctcacccatggaagcacaaggggtcggggaattccctcccccagccaatggaggctgtgagggactgtgccatgaggaatggtgcactctggcccagatactgcgcttttcccacagtcttcacaacctgcagaccaggagattcccttgggtgcctacaccaccagggccctgggttttaagcacaaaacagggcggccgtttgggtagacactgagctagctgcaggagtttttttttttttttcataccccagtggtgcctggaatgccagcgagacagaaccgtttactcccctggaaaggaggctgaagccagggagccaagtggtctggctcggtgggtcccactcccatggagcccagcaagctaagatccactggcttgaaattcttgctgccagcacagcagtctgaagttgacctgggacactcaagcttggtggggggaggagcagccagggagccaagtggtctggctcggtgggtcccactcccatggagcccagcaagctaagatccactggcttgaaattcttgctgccagcacagcagtctgaagttgacctgggacactcaagcttggtggggggaggagcgtccgccattggtgaggcttgagtaggtggttttaccctcacggtgtaaacaaagcctctggggagttcgaattgggtggagctcactgcagctcagcaaggccactgtggccagactgcctctctagattcctcctctctgggcagggcatctctgaaaaaaaaggcagcagccccagttaggggcttatagataaaacccccatctccctgggacagagcacctgggggaaggggcagctgtgggtgcagcttcagcagacttaaatgtccctgtctgacagctctgaagacagcagtggatctcccaggacagcatttgagctctgctaatggtcaaactgcctcctcaagtgggtcctcaacccctgtgtctcctgactgggagacacctcatacaggagagctctggcggaggcccctctggaatgaagcttccagaggaaggaactggcagcaatgtttgctgttctgtagcctccactggtgatacccaggtaaacagggtctggaatggacctctagcaaactccagcagagctgcagctgagaggcctgtgagaaggaaaactaacaaacaggaatagcgtcaacatcaacaaaaaggatgtctagacacagaaaacccatccaaaggtcaccaacatcaaagactaaagaaagatagataaatccacaaaaatggggagaaaccagtgcaaaaagctgaaaattgcaaaaaccagaatgcctcttctccaaaggattacaactccttgccagaaaaatggaacaaagctgaacagtttgagaaattaacagaagtaggcttcagaaggtgggtaataaactcctccgagctaaaggatcacgttctaatccaatgcaaggaagctaagaaccttgaaaaaaagttagacgaattgctaactagaataaccagtttagagaagaacataaatgacctgatggagctgaaaaacacagcacgagaacttcatgaagcatacacaagtatcaatagccaaatcgatcaagcagaagaaaggatatcagagattgaagatcaacttaatgaaataaagagagaagattagagaaaaaagaatgaaaaggaacaaacaaagccttcaagaaatataggactatgtgaaaagaccaaatctacatttgatttgtatacctgaaggtgacagggagaatggaaccaagttggaaaacactctgcaggatattatccaggagaacgtccccaacctagcaagacagaccaacattcaaattcaggaaatacagagaacaccacaaagatacttctcaagaagagcaactccaggacacataatcatcagattatgtgaaggtagaaatgaaggaaaaattgttaagggcagccagaaagaaaggtcaggttacccacaaagcaaagcccatcagactaacagcggatctctcagcagaaaccctacaagccagaagagagtgggggccaatattcaacattctctaagaaaataattctcaacccagaatttcatatccagccaaactaagcttcataagcaaaggagaaataaaatcctttacagacaagcaagtgttgagacatttagtcaccaccaggcctgccttacaagagctcctgaaggaagcactagacatggaaaggaacaaccggtaccagccactatgaaaacataccaaattgtaaacaccatcgacgctatgaaggaaactgcatcaactaatgagcaaaataaccagctagcatcataatgacaggatcaaattcacacataacaatattaactttaaatgtaaatggactaaatgctccaattaaaagacacagactggcaaattggataaagagtcaagacccatcagtgtgctatattcaggagacccatctcacatgcaaagacacacataggctcaaaataaagggatggaggaagattttccaagcaaatggaaagaaaaaaaaaaagcagggttgcaatcctagtctctgataaagcagactttaaatcaacaaagatcaaaagagacaaagaaggccatgacataatggtaaagggatcaatgcaacaacaagacctatcctaaatatatatgcacccaatacaggagcacccagattcataaagcaagttcttagagacctacaaagagacttagactcccacacaataatagtgggagattttaacaccccactgtcaatattagatcaatgagacagaaaagcaacaacaaggatattcagaacttgaactcagctctggaccaagcagacctaacagacatctacagaaatctccaccccaaatcatcagaatattcattcttctcagcaccacactgcacttattctaaaattgaccacataattgaaagtaaaacactcctcagcaaatgcaaaagaatggaaatcataaccaatagtctctcagacgcagtgcaatcaaattagaactcaggattaagacactcactcaaaaccgcacaactacatagaaactgaacaatttgctcctgaatgactactgggcaaatactgaaatgaaggcagaaataaagatgttacttgaaaccaatgagaacaaagacacaacataccagaatctctgggacacatttaaaatagtgttttgaaggaaatttatagtacgtaatgcccacaagagaaagcaggaaagatttaaaatcaacaccctaacatcacaattaaaagaactacagaaggaagagcaaacacattcaaaagctagcagaagacactaagatcagaggagaactgaaggagacagagacacaaaaaacccttcagatcaatgaatccaggagctggtttttttgaaatgatcaacaaaatagaccactagccagattaatacacaagaaaagagagaagaatcaaatatacacaataaaaaatgataaaggggttatcaccactgatcacacagaaatacaaactaccatcagagaatactataaacacctctacgcaaataaactagaaaatctagaagaaatggatacattcttgggcacatacaccctccaaagtctaaaccaggaagaagtcaaatccctgaatagaccaataacaagttctgaaatcaatagcctaccaaccaaaaaaagtccaggaccagacagattcacagccaatttctaccagaggtacaaaaaggagctggtaccattccttctgaaactattccaatcaatagaaaaagagggaatcctaactcattttatgaggccagcatcatcctgataccaaaacctggcagagacacaagaaagaaagaaaatttcaggccaatatgcctaatgaacatcaatgcgaaaatcctcaataaaatactggcaaaccaaatccaggagcacatcaaaaagcttatccaccatgatcaagtgggcttcatccctaggatgcaaggctggttcaacatacacaaatcaataaaagtaatccatcacataaacagaatcaatgacaaaaaccacatgattatctcaatagatgcagaaaaggccttcaacaaaattcaccaccccttcatcctaaaaactctcaataaactaggtactgatggaatgtatctcaaaataataagagctatttatgacaaacccacagccaatatcatactgaatgggcaaaaactgaagcattccctttgaaaactggcacaagacaaggatataccctctctcaccactcctattcaacatagtattggaagttctggccagggcaatcaggcaagagaaagaaagaaagggtattcagataggaaaagaggaagtcaaattatccctgtttgcagatgacatgattgtatatttagaaaaccccagcatctcagcccaaaatctccttaagctgataggcaacttcagcaaagtctcaggatacaaaatcaatgtgcaaaaatcacaagcattcctatacaccaataacagacaaacagccaaatcatgagtgaactcccattcacaattgctacaaagacaattaaatacctaggaatctaacttacaagggatgtgaaggacctcttcaaggagaactacaaaccactgctcaaggaaataagagaggacacaaataagtggaaaaacattccatgctcatggataggaagaatcaatattgtgaaaatggtcatactgcccaaagtaatttatagagtcaattcaatgctatccccatcaagctaccattgactttcttcacagaattagaaaaaactactttaaatttcatatggaaccaaaaaagagcctgtatagccaagacaatcctaagcaaaaagaacaaagctggaggcaccatactacctgacttcaaactatactacaaggctacagtaaccaaaacagcatggtactggtaccaaaacagatatatagaccaatggaacagaacagaggcctcagaaataacaccatgcatctacaaccatctgatctttgacaaacctgacacaaacaagcaatggggaaaggattccctaattagtaaatggtgttgggaaaactggctagccatatgcagaaaactgaaactggaccccttccttacaccttatacaaaaattaactcaagatggatgaaagacttaaacgtaaggcctaaaaccataaaaaccctagaaggaaacctaggcaataccattcaggacataggcatgggcaaagacttcatgactaaaacaccaaaagcaatggcaacaaaagccaaaattgacaaatgggatctaattaaagagcttctgcacagcaaaagaaactatcatcagagtgaacaggtaggctacagaattggagaaaatttttgcaatctatccaactgacaaagggctaatatccagaatctacaaagaacttaaacaaatttacaagaaaaaaacaaccccatcaaaaagtgggcaaaagatatgaacagacacttctcaaaagaagacatttacgcagccaacaaacatatgaataaaagctctttatcactggtcattagagaaatgcaaatcaaaaccacaatgagacaccatctcacacccttcagaatggcaatcattaaaaagttaggaaacaacagatgctggagaggatgtggagaaacagaaatgcttttacatcgttggtgggagtgtaaattagttcaaccattgtagaagacagtgtggcaattcctcaaggatatagaaccagaaataccatttgacccacaatctcattactgggtatatacccaaaggattataaatcattctagtataaagacacatgcacatctatgtttattgcggcactattcacaatagcaaagacttggaaccaacccaaatgcccatcaatgatagactggataaagaaaatgtggcacatatacgccatggaatactatgcagccatacaaaagaatgagttcatgtcctttgcagggacatggatgaagctggaaactgtcattctcagcaaactaacacaggaacagaaaagcaaatacctcatcttctcactcataagtgggagttgaacaaagagaacatatggacacagaggaacatcacatacgggggcctgttgtgggggtgggggcctaggggagggatagcattaggagaaatacctaatgtagatgatgggttgatgggtgcagcagaccaccatggcacatgtatacctatgtaacaaactgcgttctgcacatgtaccccagaacttaaggtataatttaaaaaaagatacttcaaagaaatataaaaagctttgcatcactgtaatcagagcctttgctacttaaattctgtctattccttgagaactcagcctttgtccaagagtggcaatgtcatcagaaagaaaatcacactttttaaaaaagtgttcttggtttgattgtacaggtgacccccacaactcaactccatcagcccatttaaataaattccctctgcaggttttactatacaattttgaaaaaaaaattttttttttctgtagagacagggtcttgcaatgttgcccaggctggcttcgaactcctgggctcaagtgattctcctgcctcagcctcccaaagtactgggattacaggtgtaagccaacacgaccagtcccctctgcagtttttgaaacccctatttgtagcccatgattccagtgttacctctggtcgtaagacagcgccatggcccggattccagcgtcacatcctggataggcaaagagctgcttgaggtccgacacctgccggaccacgaccactcctctgtctcctcctgtgagcaggtactgcccatctcggctcagctggatggcctgtgagacacagcaacattcagtagaaatgtggttctaggaaactttcggcccccaccctgtttttgagtcattcttacaccagctactacggtgcagagagaagagagagagatcctcaggagtttttagaaaatcgtgagttgtagaagatctgccatttttcaaaaaccaaatggacaaagttcatcaatgcttgagattgttttggctttgcttttttaaatactaggtagcaaactcttccagttctacaaatgctactggaatggtgtgtgttgtggactgggaccagtgctctaatgagaagccctggcatctcttcatttgcactgcagacatgctaataagcctgttttgtcccaagacttggcagatggtgccacctgaccttacatcccctctaatcccctgcaactccagctggagggaggcggccagcagcctcggcaccttccctgagcctgctggattttgacagcagttgggaagaagactttgtagagagctacaacaacttccagggtgattaaatctcagttcagcattttcttgctccagggctgacagtgctccagcctgtggtttagtcagctctaggctgtgcccctctgtcctttcctactagcgctgaacagacagtacaggctcagaatttgctctttgatcctgtaaaatgggcatccatgaatgaaagcctgcgggccaagtgcagcccactgcctgtttcatataattgtttaacattttttaatgcttgaatttttcatgacacatgaatatttatatgaattccaaatttgaatccccataaacaggtttttttttttcccccctcgagacagggtcttgctctgtcacccaggctggagtgcagtggcgcagtctcagctcactacaatctccacctctcaggttcaagtgattctcatacctcaacctcctgagcagttgggattacaggtgcccaccacaacacccgtctaacttttgtatttttagtagagacggggtttcaccatgttggtcaggctggtcttgaactcctgacctcaagtgatccacccgctcggactcccaaagtgctgggattacaggcgagaaccactgcgcctggccttccataaataaggttttaccagaacatcgccacacctattatttgtttatgactgctttcacaggtagttgcagcagagaatgcagaaccctcaaagctgaaaatatttactttctgtccatttatagaaaaagtgtgattactcctaattgtccctccctcctccaaaagccaatcctattaccccttcctctcctcctgcctggtacctccaagccttgctttcttagcttattaagatacaaatttcctttctttagtggatggcatcagagttttaaagccactacaaacacctgtaatcgcatgtccacctggacacaggggaatacagattgtgctggcaagccagaaagaaaaaaacctaatttctgatacattgacactgttctacattcagttctagcatagctgccttaagtcttcactgtttgacatatcttttaaaaaatcatagaaaggcaaagactttcttagccatttatttcacattcacccaaatgccaacttttagtagtcccttaaatacagcttattctcaagaacacaaaaacacatctaggaaataaaaacccatgtgtggaagacagttagttacatattctctaagttttgttaacacagatattaagatattttcaagatgagcaaaaatcagtatccttttcccccactcatttcacaaatggcaatctctaggggtgtctgggaactgcagtggagactaggacaaacaattatttgctacacttataaaattcagctgatgaaaatccattaaccttatggttgtagttcatttgaatttgatacttgaagctttttactggataagtgttatactaaaacaaaaccactgatctttaattctttgttctagtaaagaatctctaatcctgcttccatctgaaattaagtaaaacctgggctttagggactatacagtcatcagcattcaaaacattttaatgaatcagatgcctcccaaggtgaaaaaagatttcgctggcctctttcaggagaggccaaattcctctggcggcaagagccagggtaacatttagcaagcagcacctgatctcccactcaaattctgacaggccgcctccgcatccaggttgggttgtgactagaggttttcagagggccccagacacatgttaatctcatcccctgaaatcctgagtgctctggacaatgccgtggctgcacgggttttaaggaggtagtagcaggccacagcaatctgctggggatgaccacattctaaaacagcctcaggaagggaaaacaaatgcattcccctgggtgaatggtggttctcccttgtttaggacaaaataactttgctgctctgtacaggctgcctccttaaatatcagctattcataaagacatctcaacactgtctagttgatggactgtgatatgctgctaaccaaaatgccacagagcaatctggcatctaaaataaaaataggtgggaagtgcagagcttccccaggctgcctgcctgcagggttcttggtatttcacagaaacttaatttctggtctgagctgatgactaatttgtttccatggtgtccattccttatatgggctcagattgaggaaggagctggagattctgccctgtggtgtcttggattcccagcctgtggcttccttcctcgcctcccgaggtagtgagctgtgaaagtatcagtctctggagctgtgggcaggtattgctcattttaggcaagctcgctttaatcacacagttgccacttgcaagttagcatgataaagtgcaggagtgctgggaaaaaggcaatggattgtttaagcctaaaatccagtgggaaatattaaagagggaaaaagcaatggctacagggcagagaggagaagcatgtgtgtatgaatggtctgcagaaagcctcccactgctgcctcaaggaacttcccagagcccctggtactaactgaaatgccacagaaattgcttcagtcagccagggatctcaaattattttacagatttattagcgtagctgacaatataatcgcaactcaaagtgacagattatccacattattattgtaaagaaaagaggaaaagaaaatcctctgatgtgtacttggtttaaatgcagcattatgggaaggtagggaaaaataaaagcgagtacgagtgtgtctctgtgcgtgcctcgtggaggccggcagaatgtgatggagagaccgcagagaacagtggagacaagaaggaagccgtccactgaatcaagaaatgaatcccaggagacagagcagcaagggtccttcatttcctcaatgtaacctatatgtaggagctttgttccctgagaccagtatttacttaggagaagggggtgatcagactagatctgggaaagtgggagaatttatgacatctaagctgcataggtcagaatagcaatgagtgaaatatccagagctagcccaacgccagggtagaagcccctgtgaccctactcctgcccccaacatgtcctgggtcccctcattgtatacagctcacatgccccgccctccagcctgattctggaaaatgaggaccaccccagctttattttactttaaccttcaccaaggagtttggaggtaagaaacaaaggaccttgagaaactagcctctgaaaagaatagttcttactctttttctcaatgtctaatacttgtggagtcctgtcctggagatgaagcaagagcccagaaggtccactggcggtgccatttcgggtagacccagtgggagaaaatgcctgcctaattcatatcataatttgaagcccagcttctttaacatgtttttggtcttgttgtccataaagaagtcatagctgaaattaataaacctaaatagtcataatccctactgctcccaccaccaagctattcagatgtaaagagaatccagttttaagtgtcatctaatgtactatttcagctttcatactcagaaaacaatgtgcagtgcattttcttagaaaaaaagaaatgagcagtgccactaaaagccacccaggatggcttcagaagcccctaagaaaacctcttctattgaaggaccgtcctcagctgcgctgagtgacgtggtcagcacagctggcactgctgtggtgtgtgaagtgtgtgagccttgtctgagtgctacctaaagattttttgttggtatggaaaagaggccctcggcaatccaaaaatagaggtttctttcgcgaaccctctccctccccacttgacacacgttgaggtaaaagtcgtgaatgctgaagagtccccagggcactcactcttatgttatcatctgtttccatcgtggcctggagttttccattcacactgaatgtacagaagaggccgttttcatagaatatgacacaatgaccctctcttgaagcctgaatgagttttggtttcaggcagttttcaggaccctccaaggtcctcaacaagtctccattcatggaatgtatgagacatggtccttctgagaagagaggagaaataaaaggcaaaattattgaatgaaaacagacaatatgatctgaatcttgagcacagatcaaacaggattatagaaccacactatagatgtagaaagcctttaaaaaacttccatcttacgtgtaagttattttgcaaaatctcctcttcatgtttgccagatctcaccttccactcaggagaggagagaagccaaaccatgtaagtccaagttcactttcctcaagagacaggaagttactctatgaaattcattatgctaacaggcaatacaaactggaggaactgagaaacaggataagcttcaaattctagcacagcttcaaggaggctgggatgcaaacaaacaagggctgcgggcaggtacactaagacctctccctgcaccttgcaggagccccaacggccacggcactgtgggcctatgcagggacagccagctcaatcagcctctgagtgccttagccctcttcccccgcaactgctcactactttttttacactgaaagggggtccctggtagttcctctcaacctccaaaaaattcacacaggaacccttcggccacttctccttggcaactgagtgaagccacctccctgctgccttcacagcaaggagcagcatctaccactcccaacgcctgggtggaccaccaggccaaggtgccagagaaggacaggcagctactgggagcccacacacagccaagctttttgtttctgttgagtacctgctgcatgcaaggcaaagaaggaataaggaacaaaaattgcttgtgtgatgagcaagttccaagagatagtcagataacgggggtcactggggtatgcgccctgctactctactggctaaattactcatggccacatggaatcgttgccttttccccacaatgactattgaaagcttgcccttttaaaaataaggcttttagctctttcttgaccactcaggtagttgataaattttttaaatatccacaggcagtgtttgctttacacagttccagcatgcatgaatttcagttatcactccttaaataacaccagccctccaataacatagttcaaatttaggttgtcatagtaattgcataaagtatgcacttttgtggctagctcttcagtccacaaatcactatataaataacagatgtgcatcatcatcatcagtgaccaatcacatcactcctttcaaaatatgtcgatgactgctcactgcattatctgttattcagttcccacacagacagcaaactgtgcagctgtgttgcttttttgtctcccagtgataaagccatgtaacatttcacaaaaatggataatcaaaaaggggtattggccaacaaagatgaaactgcagtaaagaaatggaaaatgataaaactgaaagtacaatttgaattgaatataaatggaattatagaagagcgagctgcctgtgggatgctgaccctgctgagacactgtagatatgcagccaggaagggaatgaaggaacttatcagtgtaagttagggaagaaggtgtaacaaaaatgtcccagaatttaaaccagcaaaagcctcacattaaaggaattctagggaatatttcatgacattgaaagcacaaaagataaaatgttagatgctggttccaacttagaaaagagtatgacagctccccaaggcatagaaaagatgctagctccttacatgtatataacaagaaggcagtaagcactgttcaaactactcttgatatgtttttcacaaataaaataattatcaatgtatcaaatgttttaaattacagtgtattaagtacatgtgagttttactacttttttcatgttatatgtataactgagtatgagtttttaatgttttgacaaaattattcttagagacagggttttgctgtgtcacccaggctggagtgcagtggcatgatcatggcttactacagccttcacctcctgcaatcctcccatctcaccttcccaagcagctgggactacaggtgtgcaccccatgcccagctaattcttaatttttttgtagagatgggggtctcactatgttgccagactggtcttgaactcctggcctcaaatgatcttcccaccttagcctcccaaaatgttgggattacaggcatgagccaccatgcccagcctgacaaaaatttttaaagaccatggaacaattgtaaaatttaccaatgattattcagatcactttgtatggtttcagttggcgtgctcacttttacagttccatactactgtgcaaagaaaagatgacctgtaatatataataggttcattttacgactcctgttggctcaggacgtatgaaattattgagtataagggaaaaatccagtggttatagaattattgctatcattattactatttcaatgttttgaccaaatttataaacataatcctttaaatatttaaaacaccttattaactagactaataagtattacattttaggacacagaggagctgatccaaatactctgtttccccaccagataaacccaaaagatgtgagatataatactttgttgtgtgttcagacttcagctcagagcagagacagagagatggatagactattatgatgggataagtaagcaacgaattggaaacagctccattcctagtcagatcctgatttgttgcatgtgctctaagctcgcttaatatcttgggcctaaatatataatgctgtttccagcacaaacctccaggcaaaccagcttaagtatctttctactccactctcaatgccactgtggcccctgcctcattaaaacagacagggtcaggggcttccattcagatataagacggaacctggcccagtaatagctcagaagaataaacaaatatacaaagacgttccttgttcctgcttcaggggaatatgaatattaacaggatatgtttgtaaaaacatcttaaactccttagagcagtgctgtgaaacagaactttctacaatgatggaaatgatctgtatctgtgctgtccaatgtagtggccactagccatatgtgagtactgaggacctgcaatgtggctagtgccacgaagaaacttacattttaattttatttaattttaaataatttaaatagttccatatgactaatggctatcataacagacagaagctttagaaaaaaggtaccaaattaatctttggtaatttgtttctagaagacagcaagaaatgcatccattttgtgaaggtaccacaggtttaccttgtgaaccactcaacaccaggcctagctccgcacacaccgcagcacatgtgacctcatagtcatggccggtcaaaatggcccgaggagcagcagtctcacctttaggaaaaaacagataaaaagaacaaatcaattcaatttcatgcatattaaataatcaacaacttgctcctaatttccatcatgcctatttaatttatagtttgggaatttgtccagcaatcctactttaggactagatccaagttacatactatagtttgattatgagggccacatcctgctaaaatgtcaagtaacctttatgtgattatcaagcaacaatggttgaaaactcagggttaaatacaacaaaatctgcattccaaaatgcctcataaaaaatcagcccctcaattagatgttttatggtcagatgattataaaattaggaactttggctcaatttacatttcaaagaaaggcctcgcccctccttcctccttcctcatcctttgtgggccgctgaaacccatcataatgaagacagtctgaactagacttctgctacccccacagtaattctgcagcccctctcttaaatatgtattctctctactaagcttatgtatttttctgatatataaatttcatggatatatttctctgtggttcattcaaataaccgaaaaaaaacccaatataagaaacacctaaaaaaaaaccaaacccttacagataagtctacagatagtgattgaaaatgaggggcggtgggtagagaaggggggacagaggaggagtatccaaaaactggcagatattgccgaatactttcacaacttgaaagaacaagtcatcctgtatgtctgtcccaaactaaaaagaaaacgtatggttggttggttggttggttaataaggaacccatcatgactaagtaaaatggtaatggtcttgatttgtggatgggttcgtgccaagccacaaggataaactggattccatgtctagcctgaagaatatgatttgaagactaaacggatcctttacttttatagtctctaaaggtaaagatacaaaaagtctttccaagtggagagcaggattctattagcattcccgatttcttgatttggattggttttatagtatgcttgataactaacactgtgtaatccagaagagacaaatgtgcccacagagtaagtggctaccaccagctatggaactctgtggaagagaatcgcttgtatcttaaccccagacacctgactatccttggagcagtcacccactcagaggaaggaagtccagcagctcaggggaaacccactggaaacctactgtacttggaaaggcaaatgctgctgtcagaaaactaacccggcttccaaagcaagggttcttccagtaggtcactgggttatttgaaattttatgcaaaatgtatctacatgcctgtttttctaggtagcaggggaggaaaataagttttactgaatggacagaggtccatgaacaagaaaaggtgagaggcttctaccctgaagggaggtctggtctctgtgcttgtagccccacttcacctggagccagcagtcacttcaggtctagcttttcacaggacagttccaatgcatgtaccagagtacataatgcacggccatgtccctacaatgtccttcaaggctttggtgactgtaggtaatcctgagtgagacttaagttgaaggaatgccacacggaactttgcaccacactggcgtgctatgtgcagccagctgctggacctagcctacaggcttagtgataaagggagaccaaaaataacatacaaagaggcaagggggtaggcagaacaaggggcttcgtttcatttgattccaagttttaacacttctttgggaggcaaacttaccttaattagaaagttgacatttcccaagccacaaagaatttgtcacaagagcaattttgtttcttacaaagtccagaaatttgggaaaattttaaagaaataaagcaaataatgtaagccaatctgaactacttaagcttctgttaggatccacaaattttttttttttttttctgagacggagtctcactctgtcgcccaggctggaatgcggtggtgcgatctcgactcactgccagctccgccttccaggttcacaccattctcctgccttggcctcctgagtagctgggactacaggcgcccgccactgcgcccagctaattttttgtatttttagtagagacggggtttcaccgtggtctcgatctcctgacctcgtgatccgcctgcctcggcctcccaaagtgctgggattacaggcgtgagccaccgcgcccagccaggatccacaaattttaggaagaagtatactgttttaaaaagttattggccgggcgcaatggctcacgcctgtaatcccagtactttgggaggccaaggtgggcagatcacctgaggttacgagttagagaccagcctggccaacatggtgaaaccctgcctctactaaaaatacaaaaaattagtttggcgtggtggtgtgcacctctaacaggtaggagaattgcttgaacctgggaggtggaggttgcagtgagccgagatcacgccactgcactctagcctgggcaacagagcgagactccgtctcaaaaaaataataaaataagaagttatcaatactttagccctgattcttggttttccttttccccagaaggctgtacattccacaaaaataccatacaatgttgtttctgaaattactgtctaattagatccattggcaactttttttttttaccagcaattaaaatcactaagatctaaggaatatatttttggtgtgattgttcttttttttttttttttttcttaagttaccatttcatggatggtgaaatttgtgttttaacttgaattgtcttggaattcctcagtggaaagtgaaggtttgaaggaaagctgatggcaaatgaaggcattctaagtataagacaaagtaaacaaaggacagatagataatggtggtcccagaggatgatgtcacttaagaacatcaatgctaactttttgttttcttgggagcatggtggaagaagggagaggattgctgtcaattttctttctttctttaatgtaaaagagttgaaatactgagcattttctatgactacaaagttaagagtttaggaagcctcgtgattaactccagaaggtgggttaagatataagcattattttttttgtaaactcgtaagatttttatcattatgctttgtttacaaaatactagtttccaataatccaaactttattaaatcatttttcactccacagatcagaacacacacacatgcagagtaatttcaaaactggaaaaggatttcttcttttcctagggcctgatctctaaataaggaactattcaatgctaggactttggcttcaaagtttggcaaaatgtttgctaatcccggaagcaggttagacagttcaggaaatacaaaagagagagagagaaaaaaagaaaaagaaattaaaagcataagggtagacttatgatcattaggttctcaggtaaccagttttacagtcactggatttccagtaaaaagacagcgctacttaactttcctcacctataggaaatgtacattactggcctctataaacccacatacatcaatataaggagagatatgtcatttcctctaagaaaagctgtttccaatcttctttaaagattgtattccctttattatctgctgtacagattgagcattctttacattttctcctcatcaaaaagtacattcaaaataaatacctactacttgatttttataagttttataataaagagcttgaaatagttacacttcaatatagcagatatatgatatgggatttaaatctaacaggtcaaaactgtttaagttcaatggacattttgggaaccacttgcaatgaaattactgagggtagcggggataatcggaggcagagcagaggctttacatgtggctcacagaatcgatctttttatgtctctgtagttacactgtatacatcatcctggatcacagcagagccaaagtgacaacatcccacagaaaggaaaggcaaaatccctccatatctgtgtacatttctgtttggaaagcctagaaacaaaatcttggaaccatataactcattctcactgcagtgttctcagaaatctgcccctcccaactacttgtcagcccacatagttaatacccagggagaaataatcagctcaaacaagatgattctggccatatgttacttttcaaagatgccaaaactatcaataatctctcattgaagtctctaaaccaaacgaagaacaagaaaaaaaaatcttctgaaaaatatcaagttaattcttctgataaaaatttgcaatagttaagggatacaaaaagtctttacctttgctttctgagatagtaggatctcccaaaggctagaccataaagcagaacagattcccttaagaaccttttaaagtcttactgcttgaaaaattgtcatggccttcaataatgctgagagaaaaatttatcttgctgctagtttaagggactacatttcaaactcttcttaaagaaaaataaaaagagaaagaggacagacttctaggactgctttgaaaagcttgagcaattacttcaaaggaaagggtgtctttgtccagagagcacgtttatgactactgatgcaaatcctaaccaaaggctgaaaaggatacccagtgcatctttatggatggccttaaaggaagatgaacaagtcaaatgagattaaagacagcccaaattctgctgcaaataccagggcacatcaggttttacagaggcacttctctcagtacgtaatactagatatcaataccaacttacagagacaactataacaacctaacttgcatttaagcaacacaagatctctatactaaccacttagcatttatattggacttatgttttatttatttattttttattatactttaagttttagggtacatgtgcacattgtgcaggttagttacatatgtatacatgtgccatgctggtgcgctgcacccactaactcgtcatctagcattaggtatatctcccaatgctatccctcccccctccccccaccccaccacagtccccagagtgtgatattccccttcctgtgtccatgtgatctcattgttcaattaaacaccaaaagcagtggcaacaaaagacaaaattgacaaatgggatctaattaaactaaagagcttctgcacagcaaaagaaactaccatcagagtgaacaggcaacctacaaaatgggagaaaattttcgcaacctactcatctgacaaagggctaatatccagaatctacaatgaactcaaacaaatttacaagaaaaaaacaaacaaccccatcaaaaagtgggcgaaggacatgaacagacacttctcaaaagaagacatttatgcagccaaaaaacacatgaaaaaatgctcatcatcactggccatcagagaaatgcaaatcaaaaccacaatgagatatcatctcacaccagttagaatggcaatcattaaaaagtcaggaaacaacaggtgctggagaggatgtggagaaataggaacacttttacactgttggtgggactgtaaactagttcaaccattgtggaagtcagtgtggggattcctcagggatctagaactagaaataccatttgacccagccatcccattactgggtatatacccaaaggactataaatcatgctgctataaagacacatgcacacgtatgtttattgcggcattattcacaatagcaaagacttggaaccaacccaaatgtccaacaacgatagactggattaagaaaatgtggcaaatatacaccatggaatactatgcagccataaaaaatgatgagttcatgtcctttgtagggacatggataaaattggaagtcatcattctcagtaaactatcgcaagaacaaaaaaccaaacaccgcatattctcactcataggtgggaattgaacaatggacttatgttttaaaacattaggtgaaatattttaacaccacttggcagaatagcaaacgttttcattagttgtgtttctttggtgccctcgcaacattaagtatatttatcaaacagactccgaaccacttaaaattacacctgaaagaagagaaaagaggaatttctctagtatcttgctcataaatatccagtgagaagaatatttcataaggcctatatccatttaggaaaacaggtgacaatccaggtacaaatagatctgacatgtattttctggcaaacttgtagttactttataaaaagtgaatgaagttcttggtgttttggcgtcatctccttactcttatgaaaatcagatcactttgaaatgcagtataacgttttcacttgtaggttaaatatgttgttattagcagagtgaatcctcttcattccattttctcaataccatctattaggaaatgaagcgggattaaacattttcctattcctagttttgtacaactaaaattatttcttccaattgatacttagtttagatgactcctggctgggccagaaaatcacatatcccacttgttcacccattcattccttcactccttcattcacttaataatatttattgagtttgtattcttaagatatgtgaggtactatggaaataaggaaaggagtaaaacacagccttttatttaaaaataacttgattttaaaggatcattggatctggttttgtcaactgtactataaacctgcaaattataattataaatatctatgcttgtaaaggtcaacataatagtactgaagtccataccacttgtaacaactaattttgtatgcaaaatcaatatttaacaataattaacatgcttaaagaccaccaatataattttcttcattagtaaaaatgtatcatctgaacttttatagaggaaaatcaaaatataaaacctggctttataaaaaaagtaataatttcaatagaaaacaaattaagaaataaaatatatttgtttaaaaagcccaaatacataatgaacttattaggcatatagattatagataaaaaacaaaaatatattatacaatatatgccagtcatttcctaaagacggatacctctattttacatgtgccttttgtaccatttagttacaattgattactacaaaacattcatgtgaaaactgaatactaagctttctcatgcggctcaccataatggtaaatcaagaaaggaaatggctttgctaaagcggaaatgagcttagatattaaatgtttcttaaaccttttccattaacttcctagttttacaatggaaattatactgcattttaattatgcttagaaaaactacttgaaatttgtcctatacatttcatcttcaccaaatcttttcccttcccctattcatcatggtctctttggtgaaaaatcacaatttgattagacatatagactatagatgataagccatagctgcatttagagtacaacaaccatcagacaggaaattttagtagcaacttcttgtaaataatattagaagtattaatgcaagacaagataatgttggtacaaagaacaactgtaagtccttggtatataacatttctcctcttctctctatgatacatataaatgttggtaacacgggaatcaccctctaagactaaggttgacccttgaacaacataggtttgaactgtatgggtctactcatttgtggattttcttctgcctctgccattgagacagcaagaccagccctctgcttcctcagtctactcggtgtgaagacaacgaggatgaagatctttatgatgatctacttccacttaatgcatagtaaatatattttctccttacgattttcttaataacattttcttttctctagcttactttattataagaacacagtatatgatacatataacatacaaaatatgtgttaaccaactttatgttatcagtaaggcttccaagtcaacagtaagctatcagtagttaagtttctggggagtcaaaagttatatgcatgtttctgacggtgtggggggttggcaccccgactcctgtgttgttcaaaagtcaactgtacattagaaaatgggtttatatgagtgtgtacctgcaagtgtatacttaaaagtataccccttaaatgtatatttgaaaaatacaaaatcttaccatgacatgtactgtcataagaactcagtataatacagttgtctttttgtgtctctcgcaaatactaagaatgctttagtgataggattgcatcaacttctctatagctgatattctaattaaatgtatagtttagataactctgacctagactgcctgagtttaaatctaggctccagcacttgctagctatgtgagctcccttgggcaagtttccataattctagtaaggagatcctaaaagtgtcaaggcccagggcagaaagtaaaggcatatttataatttctccatgcctcatctataagtcaaggatactaacagtagataccacacagggctactgtgaagattaatgagttaatatgtaaagcactcaggatggtgcctggcatgtagtgagcacccattagtatcatataagtagtagtagcagcaggccaggcgcagtggctcacgcctgtaatcccagcactttgggaggccaaggtgggcggatcacaaggtcaggagattgagaccatcatggccaacatggtgaaaccctgtctctactaaaaatacaaaaaaattatctgggcgcgctggcgcccacatgtagtcccagctactcgggagctaagtcaggagaattgcttgaacctgggaggtggaggttgcagtgagccaagatcccaccactgcactccagcctggtgacagagagatactctgtctcttaaaaaaaaaaaatagtagtagtagtagcaacagaatgatcccttttttcactctgttataaacactcctttcattgaaagtatatttcatcctatgctgcataaaagctaattagagatggttctctccttgataattcatataaattctgatacaactactaatatttggcagcctagaggctaacagtggggagtgaaggtacagtacagtaatttggtgcattccccaaattaaaatagctttttttttttttttttttttttttaagacagggtctcactctgttgcccaggctggagtgcaatggtgcaaccacagatcactgcagccttgacctccctgggctaaggtggtcctcccacttcagcctcctgagtagctgggactacaggcaccacacccagctaattttttttacttcttgtagagacagcgtctccctatgttgcccatgctggttttgaactcctgggctcaaacaatacccttgtcttggcctcccaaaatgctaggattataggcatgagccactgtgcccggcctaaagtatctttattgtctctgattatcaaggtagtacatgctcattataaaacattcagatacttcagtaaagtatgatgaagaaaatgaaaaattgcttccaaatcccactacctataaataaatgttgctaatatatgtcttgtgatcatttcatactttttctatgcataaatgtacatagaatacaagtgtatacacatataggcataggtacttacatatgtagcttcgtgatcttttacacttagcaatacaaagagtgtatccctccatgtcaatattacaaatttatagtatctttgttaatgcctgtacaggacttcattacatggacatatcattactatacttaactaatgtgcttcttttttcctacttgcttgagacttcatttgttgttttcccatggaggggcttggtctttggttctaggtaagctatggctcctgtagctgcatatgagtgtctggtaacataaacatggtaaaattctaccccccaaaaagaaaacaggtagaaaatttgctgaagtgaaatcttattcagatttgttgcaatgcaacattgtctgatttttatgaatataaattaaaactgaaaattggttttatctatttatcctaaatacccaaattatttaaaattctttataatacatcctccttaacatttttaatgttcttttgttaaaaatacgtaagtaagggactctgaaaactatagaggagtttcatatctttagctattaaacactcctgaccccactcacccaaaggaaataaggcagtctctcagttgtgcaaagttacaagctacaagaatgaaagcttaaaaagctcaacagtcatgcagccttaagccacaaaaggcagaaacaattcagagaatttttttcctatataaaaacacttcaaatccaaaatctgaagtcttatcaaacacattcattttctcacttgaatgtgaaaaaaattactgttaaaaaattaccagataaatgaaatgtaatgatatacttagataatggccctgttaaaagaccaagaaaatcaatttttaaaaatttgttaacacttataaacttctgctctgtaaagcgatataaatgagcatagcacataaaaattgaggtaactagaaaaaatagggtttaactgttgcttcgtaaaaaaaaaatcagagatttaaatattgaatttcatataaaaatggttatcttttcataaattatcagtaatatctagagtaaaatgtgagttacataggcacaaagctgtcgtagaatttctcttacgaaatgagcgtttttggaaggtagtaaagtcagtctactatgttgttccaggaagctttaattaagtgtatccttggtagttctaccaataatgttatggaccacccccccgcgcccacccccaccgccggcacagagttctgcaatattttaaaagcagaagaatcctacgtttagttgactagaaggaatttttactttcttagactaatgccaactattgtttgaaattaaatttcccatatgagcataaagtgtcaagacaactttctttggcatggcactattaaaaaggtctacatatgaagatactcaatctgagggtataaatcatcaattcttctgttctcatatttatatggctataacctatgggctgaatggtacagtcatttttctctgcaaccaaacaaggtaaataaatgtgatatattggcatatcaccccaccactctgcatatggtgcacattaaggttgtattcatttgccatatgaatataattcctttttaccacatctactattagttacaagcagtaaatacagagttgttttgctggaacttgagggcctgcattgcatcatggagcactaaacatcctggaccttctggagaatttcatagacatacttttaatgtcacctgaacttgaacactgccaacataccatttgaaaacgcttcttgataaatgcttcaaggaaaaaataaaaatacagggtagctgtagtgtgacagtacattccaaatgcaggcccagaagggaaggtcttgatgagacacacacaagaactcttgttcctgacaaaggatcagatcaagagtcatatccaggtataaaatggtttcttgtttcaagcattactttcttattcagaatctagtgaacataaggaacctaaacataaaataccatccaaataacttcctcaacggtaacttattgaagagctgtgatcaagaagctaacaagtttatttcatcaccaactgtggtgctttgtttcattaggcaaatattgtgcttgctttttccttacacaaaatatttatcgtacagttgcaaatccaggttagggtagggtaaaaggaggagtaaagtgatttctttttaagaactcatatggttcaacacaaatgtacataccttgacatttgtgacccttaaataatatatcacaggcaattaaaaacaaagtacacctgtcttaaccaagtaccaattttcatgtttcccaacattaagtccccaaatgcatccagcagatggtgctctaggacacctacttacagagagtaatattgtttatattacatccacctaaattttggcaagacaaagaataagaatttatcagtagcttcagtaaaacatactaggcttcacaataaaaaggacataattcctaaatatgtgtacaaaaatatgcatacacataagcacatgtgcacagaggcagccagtaaataattcacacctggacatgttatgatactacttttcttacagacttgatgagtagtctatgtgtatcagtagtatttatagtcacatggcaagatcattctaaattcattaaaaaaaatttagaatgccttaaagttagaattcatttttaattatagcaggaatgtctcattagggtgatactagtaaaattaacaacagtaggatttacggtaatgacttaagtgattgatgagcgtataacaaaatgaagttttagacagagaaaaagcagggcagctatggcatacagtactttaaaaaacagctctgtggtctgttagtgctagccttatggttaataaaaccttctttctaattaacggtgctgaaatattcttaaagaacagaatcttgttgttatgaagaaaagttaggtttttttctcagtagacgccaatcccataaaggagaaagctgacatagattagcatgtctgattgcaatgaggaaaagaaaaaaaatgccacctttcaatcaaatcaaaaccagaatgcgagaatggaaaatgtattactgaaatactacacacacaaatctgtgcaacaccctcacagttagcaaccatttgcttctgaagctgatcgaatgtggctttaaaagatattattcagatatctaaaaatacctaataaacatttaattttttaaatccatgtttatgaatataaaagtgaataaataataactgttttgtatatattcatcttgcttatctaaataagatcatgtcaaagtttaaagtatttatttatcaatggaatgcactggggaacattttctccaaaatttaaaaatgtacagtctggagagcattattctgaaggtgaaataactatctcaggaaaagcactttggtgacaaggctcagtcctaaaacacagagtactaggacaaggagagagagatgccatgctttcatgtacaaaacatctctcagtgaaatattcttggttaatttcattttttaaatccctaattaaatggaatcctatattcatttttcttctcattgaaaaaactgcattccacaggagataattattacaaaacaatagagtcaaagatgaaaaactatctggtatacaggaaaataagccttttgctatgtagtctaggcaggcttcataaaacatttacactttttaaagccccaaattacagtatttataggttttacacttgatcttagccaaaaggctgagaagcgatgtatttataggttttatccagtttgaattagcctgagattgccaaagcagtatgtatattaatattagataatatgatatttttaaaactttgtcatacagctatcaactttacatataacatcaatattagatatggaaaaaacagtgtatgtaggcttatgaccctagaaagtaaaatgactacctattcccatgattttttaaataaaaaaaccctgagatagacctataaaatgcagaaaaagcaataacctggttttcttttatctattttcccttcaagaaagaaaaagtctacaataaaaaatttaaagttgaggtattaatgtgcatttatagaacatattgcaattatatgtatatacacgcttcaccacttcttaaaggtcatttacattgtatctaagaggtacaatataggaatacacataacctaaaacccttcatctgaaaagctctgacttcagcagctgcattgtggaaccatcaatgagccagaggcttataaaatccgaaccagcttgcatgaatgtttgaaacagtttacacacggtaacaatgtctttgtttttgtttgtcattttcttttgaaaagcgtagattgcattttccatttttctattctaatatgtgtaaattctcattataagaaaaagtgcctatttgtctttctcctggattcatctttcaaagctgaagcaaaattaaatcggggcatcagacattatacaggggcttgaaaggataaggttcactttgagaaaggtaatttaattcagtcaagatacattacaattttctaaaatttttattagatgtgctgttatattattcttttattgtttttcttttcattgctagcattactaggaggtaatgtccaccatactgcagacaatgagagggtatagatgaagtacgctatgaaaaatataacattataatatttactctaatgccaacaagatggtgttttgtggtgatttatttgctctaatcatcctgtgcttctgataacaccttaactcagttctgttgttgctttcattttacagacaagacagaaggaccacagcaaagcttggaacttagattttttttttactacaaaccccaggatttgttcagtcctacttaattcgttttttaaaggccatgcatgtaaaaacaatctctaggttgagttacaaagtatttaaacatatgaaaatatatttaaatgtatacatatatcatgatatatatcatactttcttcctttgcgaagagctgaaaattcctaactttaaggcatacttaactttctgaaatgcaatagtaattacatacaagtgtagctaataggtctttagctgctttttagaatacacattggtaatgacggtgtataacatagagaacatgattaagtaaaataaaacaagaaaccaagaacccaaatatctatgtgtgttcagatttctttatgtgcatgaaataccttacatttttaaggcaagaaaaagttcttaaatattttgagataaatagcaaaatggtagatttattatcaattttaaatataggtttgcctgagataattgagtgaatctcggtaactggatttacagaaaccagaaaaaagaaattgaaaggagtcacttattctaagaggacagacaggaagaaggaccagaatattgtgttcatgatgaaaagaacatggtacttttcaaaagaatatgaaaaacaaaatccctgaaatttgcatctttgtaatttctattgtaattacagagatgtctgtataaatgtgaaatacatgtacacctactccccgacatatacacacactacaatttgatcacaaagtctgtattatcaatagcatcacaggcttaacattatttttcatatcctatttgcataggaaattatcccttttttgattaaaacaggaaatatctattagacgttcattgaataaaaactgtatttacctatcacatcaaagtctataatgtacataataagaaacagctttgaaaaatacttcacacacacttcttttaacattatactagcatttgactaaatgttttgaaaaaaaggttcattttcatacaaatattatacatttaagaacagctttgagaagtcaatccaagatatgatggacttaaacatatttagaccatttcacaatctggggtggagtgacagagcaaggaccgggtattcaggtaaagtcatcaggaagaatgtgatccttccttaaccaaatacattgcaacttgccttaaattaagaaactgtaaatatttaagagcagttaaaatgctctaccttctgaagtaaaaatctaaagctattcttgcaggaattctacagtgttgtcataatcattttaattaaattctcatttttcaggtggtccctttaattgttttttcctacttcttaatgtgtttttctaaagccatttcttttctgcagctgtgtgcgattggttttaatggtagctgcttccttttttgccttctgtgaattacaattttaaatggttacacattttttgttttactgccttcagcatagtttcataaagatgtttaaggctgttggtgaacattttcatttcccatctgaaaaaccaagagccaatttgagtattccacattggccttttatgacctgttttatctttttaatacataaatgaaagcataattttatcaagactagtttgtttctatgaaattattatttttattttgttcttttaaaatatgaattcaataaacaaggtaatatgtgattgctcttttatgctgtatcttcatgaataaaaactactttatttggtgacagctatttccaatgaagaactagaatttttggatcataagaatagcctataatatgaaacataagatttcatgcttagattttaattatcaatggtcacaaaattgataatgaggctatttggatcattcttaaattataataaataaaaaatacttgataatcctgtctcacttttaccataacaaaaaggtaactttactgcaaaatgttattctctacatccttgtaaaagtttacttaaaaaatgagtcatacttactgcctgggttatctccaatcccactgcattttccattccaataccacagcaaaagagttgcatcacgtgaccctgagagaatgtagcaatttcccccaatatatgactcagaacgagcaaggcaagtgacgacatcccaatggccaaacaccacttggatcaatcttcctgtaatgcaaaacaattttctttaaaaatgctattaaaaaaataaaaattctagtgaacagataacttgtaaaacaacgaagctatatgaactctgatggtcataattcagattttataataatttgacatggtccaacctaacagttttctttgcatgctaacaagaacaacaaaaaaacaattgaaaattgttaacatttttgaaaggcatgtgttaaaactatttcaacaaataatacttgaggaccatggcactgtatcattacaaatggcttctataaattacaaatgaatcatgtttactgattaaagcaggcccaggagaacccttttggaaccattttaacactttcttgagttactctatatgattcaaaattaaacttagttgcttttctgtaaaagtactcataatttagatgtcactaataaaaacctatttctgatttactgaagatttaatgtatttcttgttttaagtgatctatacaaagacaatataagacactttggagagcttctaccttttcaaatcaggattatatggaaattatgatgaaagaactaatatattgtgattgcaatttgagccaggtgattctttgtcttaattttctgatgaaaattccttgagggtgaaatcaagatggtaatgactggggacaaaggagaggaacccagtaaacttactatatatctagggcttcaaacacagaacagttgttcatgtaaaggtgtcagaaaaaaagtaaagccctcacccttttttgttatttttatttatttatttttttgaggcggagtctcgttctgtcgcccaggctggagtgtagtggcgcgatcttggctcactgcaagctctgcttcccaggttcacgccattctcctgctcagcctcccaggtagctgggactacaggcacccaccaccaccacgcccggctaattttttgtatttttagtagagacggggtttcactgtgttagccaggatggtctcgatctcctgaccttgtaatccacccgcctgggcctcccaaagtgctgggattacaggcgtgagccaccgtgcccagcagccctcaccctttaagaatctttgtttaaccagatatggtggtagtaattcacacaaacttgtctaaacaattaaatagctgtgacagacccccattccatctttagaatttctagcttacatatttcctttgaaatgtctacagagtctacagatgaatgccatacaatgtctacccttaatattcagcatggctttctttttctttaaataagtttttatatttcgattataaaatataattccgatgttcaagaaaaaaaggctactaagctgaaaattaaattaatatgcctaaataggttatgtgtttaacccgtaatacattgtaaacttcttaaaaggttaaggtcccaagtactggcatatcaagtgtatttaacttttcaagataataaatataagataatatttacattaaatttttaaaattcttgattttaataaatctaaggcttattatgaaggctgaaaatttagaaataaaattctgaaatattatctaaatcagatggaaaagtcaaatacatgttttcattcatgagtggcagtcttgcatatagcctacttctaataaatttaaaatcagattcacttcaatctcaagttgcaaaactaatatagtactttttttctcctgtgattaagggagagcagacttcaaagcaagtgtctctagctgctaaatgttcaagatgttcacttttgaatttcttcagccttttaagttgacaccaaaacatttcattaaaaaataagcttatatcaataaagaataaaaaagaatccaagaccttcaagaactaaaaaaaattgagcaaattaaatgtgaaatatataataatttttacttcatttccaatttacatgacaaacagaatgtggaggttcagtggtaaactggcggggatcagattacacgcaggccttacataggataagacaaaagttaggtagctgaaagcagtcttattaataactagaaaatcaaaggttaaatccatgtattttaactactgaaagaaatacatcatatatacatcatacatcatgaatacatcatatagtgatgtgatcatagagtatatatatgacttctgctttagcctatgcctaaatgctgagagcacataaaatataggtgtgatttaaatagattatgtatgggcaggcttatttcagatttgaaacccaacaatcagtgggttgtaggagtgaggaggagtgaaataactaaccaggtacttgaggtagacgacatagaggaaacccaggtgttcttagtgcagtaggaggcttgcaaagaacagctattcacttggtaacttaatttccaactcatgtgaggacaaagggaaaaaatgtagctgtaaaggtgggatggattaaatataggggcagagttttacaagagtcacatggtaattctcatgagttgaagtcactgctctgtttctccaatgtcagtgtaaggaaacatacattcagtcatggtggttccttttcaaaatttttagtgttttgattgttttccaaaaagttatcacaattagttttcattcaacaaatacttagcacctattaagtgccaagcattaggccttcttacctgtatacagtggtgaacaaatagacatggtccctgccctcatagcctttacagtcttgtggggcagacagtcattaaacaaacccagactggtatataattatgaatagggatgagtattataaaagaacaaggttggattaatgacaataacaagatagaacaaatttacactgggtgtcagggaagatctaaatgagagagtgacatttaagcagttacatctaaagggttttatatgttaacacaaattaactttattctttacaatttatactttgggctcaactctggaaaacattatttttttaagtttactttttcctgttctggcagccttcctcagcaatatttgttattgctataaggttgaggttcactcctcctaaataaatcacagcatataaatacctgctgctctttttggtaaattattttctgataatcttataagtgttcctcaacctttattttttgtttcctttaataccagtccacctctccacacactaatatcaaatattaccacaagcactagaatatcccttttttgacagaacaaattttctagttaatgttttatttgacagctgtgctacaaataaaaaaattcaagctcaggactctgcaccactgaatctaaaatgtggcctgaaaataattccgactgccaggggaaggttttattgttgcctctgctgttctggttgtggcccgaaaacatgatttatgtttaaagaatttcctgttacaatccatgtttctcctccctcctccccaatctaataagagaaggatttttttttttggcttgtgtgctaaaatataattgaatttaacacttgtgttagctttgccattatatattactgatcatatgattttcccttgattctgtgctaaacttaagaaaaaatatttaatattcctattgttgtaaaatcacagacacatatttaccttaactgaaattattttaaataaaactagcatcagagtttttatacaagatattaagaaagacaccaggactatcgtttgagattttttttatacaacttttctggtaagtataaatatttttatttcacaagctaagtcagtcccactgaaatgaagtttaaggctattccttatttgtacgttttatacacacaaacacacacatttttaaagacattagaaggtattttgaaagagggaaaagaatgacatcaggtttattaagtctaatgtaacatggcaaacatactaggaacttagtgttacaaattacagcattttcccaaaaaaatcagtgactgactggtaacacctagatgagacaacatgctatgatcacaaagtgtgctacatttaaaatttaaaaagctaggtccaaggcctacttctgtcactattagctacatacatttcaacgaattacataatctctctaaacctcagttttattatctgaaaaatggggataagacacctgtctacttcacaggattattgtgagactgaaacaatatctagtatgtgagagaattttataaattctataaaattgtgtgaatataggattttaattattagtgttatatgaaagtgaagttagctttactttacaaatgttaatactgagtgtctttaaaaaacaataatatagaatgtcaacaaactaaaaacactcaaatgtcaaaaccaaagattgacatggtttgtgattccatttatatgacattctgaaaaaggcacaactaaagatgaggaacagattagttgttgccaggaggttgagggtggggtaaaaagttgacttctagtaggtggcacagggtatttgggggcgctctgcaccttgattgtggtggtggtgaattactctatggtttgcactgtaaaccaaaaagagtggtttacagttctattagttctatattacagtgtaaaattcattttcatgtttaaaaatgttttaatcacttaaaaaatatatggaaaaacaatatgaagtccaaaagaatatttgagaaaaactccaggagtttaagaccaccctggacaacagagtgagaaccctgtctctataaaaatttaaaaaaaaaaaaagcaaaaaaaacaagaaatagctgggtgtagtggcatgtgcctgtggtcccagctacttggcaggccgacgcaggaggagatcacctgaggccaggagtttgaggttgcagtgaactgtaactgtgccactgtactccaactgtctcttatactgtctccaactgtcttctttaaaataggcagaaaaaaaagacatgtccaagactcaaagaggagtgtttaggttcaatagtaatccaccccatagacttaaacatctagtaaaagcccaaataatcaaaaaggcttgaatggtgatgttttctttcctacacctacagaataaagatgcaaactataagaaaaccatgtcatcaattccatataacaaacaataaagattaaaaagatgttcaagaacaaactccttgaataaccaaaaattaattgttctataaactatattaaggcaggagtatggactcaaacattttataaagattattaataagactgaaagatgatttaccataaagcattcaaataactagaaattttaatttaaaagatttttcaattcctacaacattaaataaagatatatgtaggcctttgttccagctgaaatatctactgtcataatatacagtcatgagctttataacacaactttttggtcaacgatggaccacatatatgatggtggtcccatgatattataatgaagctgaaaaattcctgtcacctattgacatcatagctgtggtaacgttgtagtgcaatgcatcactcacgtttgtggtggtgctggtttaaatggacttactacactgccagatgtataaagatacagcacatacaattatgtatagtgcataatacttgataataaataactctgttactggtttatgtacttattatcccatactttttattgttaaagtgtagtctttctacctataaaaagaaaaagttgattctaaaataggcacaggcaaacccttcaggaggtattccaaaaggcagtgttatcacaggagatgaaagctccatgcgtgttcttgcccctgaagaccttccagtgggacaagaatgtggaggtggaagacagtgatattgatgatcctgaccctatggaggcttagcctaacttatatgtttttgtcttcgttttctaaaaattttttaaaatagaaaaaaacctatacaataaggatatatagaaaatatttttgtacagttgtacaatgtgtttgtgttttaagctatgtgttattacaagaattgaaaagcttaaaatcattaaaaagtttataaagtaaaaaagcttcagtaagccaattattagtaaagaaaaaattttaaaaacaaatttagtgtagtctaagtgtacagagttttataaagtctacagtagtgtacagtcatatcctaggccttcacattcactcactgctcactcactgactcacccagcgcaacttccagtcctgcaagcttcattcatgggaagtgccctatacaggtatgccagtttttatcttttattattattattttttacttgcagaagacaatggaatggtttttatctcttataccatacttttactgtaacttttctatttttagatgtgtttagacacacagatacttaccgttgtgttataattgcctacagtatcccatatactagtatgctgtacagatttgtagcctaggagcaataggtgaccccatatagcctaggtgtatactggaatatcccatctagtttgtgtaagtatactctataatgctgcacaacgataaaatcccctaacaatgcatttatcagaatgtatgcctgttgttaagcaacacacgactgtagatcaattagctctaaagaattaagagctcattttaattattttaaatatcaaactatatatttactataactttatttcatcctgtaacaatttctaaaatattttaagggacaccattaaatttctcaacgtttctcaatttcttacatgcaaaaatttgtaaacatttactcagccggatctcctacagtaatactgagctcagcttggtttgtcccttagggagatgcatgtaaatgaatatatagactgaaaatttttatattttaacaagagctcctgtcacacataaaagcaatagtcagctacttttcttcatgatggtgtagatttcagcaagattctaggcagaattgggtggaggcaagatatctactgccaagagttagacttaatgagtctttcaagtaggaaaaagaaaatcctttaaataatacaaaagtgagaaaatacacttctgtgtgtgtgcacttgccgtaagattatgcatatactcatgcatggtatttacataccaggatttgccttcaaaatgaatcatttattctgtaagcatgagcttgggtcacaaacctataaaaaactgtctcttacaaacatgctgtagcaaatttaatagtggactatatatagtagattattatttgaagagggaaaacaatgccctcttctccctattttgtaaattttaggattttgtaatttttggaaggaagcagataagaatgcatcctaagcctctcaatactacttatagtaaactttagttcactgataaagaaaatgaaaattacctgtgtctgtagaatagactctgaaacttttatcccagaagccacagacgagaatatagcggttgtctgaagtgatgacaaagcactgggaatgcacttgaatactttggtctaaaaggtcagtgatttgcctcctgtgcattcctgtattgctggctgtaagaatagggaggaaaaacaactattaaatccacatgggcaaagaaattctatagtgagggagaagaggagacacattcccagataagagtacttgatccttaattctaagtataataattgaaaaaccgagtaggaaaacatatccaattgctggaaaaatgtgggtagctaaattcaatatctcagttaaaaattttgcttagaggaaagaaagaataacacactactatttaaaaatagaacacaattcacagaacatgctttctagctcttgggcagaaccaaactagattacaatctccagattgcatcacagttaggtttgtgtttctgacaatctcattacatttattgtcatgagaatggttcatgttgtgacaatctattacctttaacattttgtcacaaggaagagatattaggatttaaatgtcatatatttgaaatattgtagcatcttgtactactttggctttaacgggtctttaatttgactagatgggaactcccatttcccctgtttacaactgcacttgcatgtaaggaaagggtagaatgactgtttattaaagattcctgtaattgaaaaagtcaaagcacagcagactgccactttcttactccttatttaagcaataaaacaagacagccttggcagtgtgtttcaaagtgctacggtgcacctgagacggggtttgtcaccaagaaaaaggtcagacatagagcaacaccgagcacatgggaagagtaataatcgtccagaaatacaccatcgactgtgccattatcagaaacggaatcttcactgagatgacttttttggcattgaggccaaccaaatagaaagctttgtttctagtgatctaagggttatttcaccatcatctctccagtacaagtaaggattctgatgctgctaaagaaatttgattgtaccagaaatcagaacaaacaaacttctgcatccgattattaagcttttcaccataattttcaattttttgaaaaatcaaacatagaaaaatatttatatgctattcattgtatgtaataactatattaatgtgggtagtttaatagaaagctcaggaagtaaaacagaagaaaaaaaagtattcaaaatactctccagtgctgtgctgggagccactggggacacagaggactgatggatctgttgccctcatggcacacacaacacggcacacacgtacacatacatgtgcaacactgcagaaattctgctaatgtctgtggacacaaccatttaagattattggataactgtttgataatggaggcttcatatgcttttggaggattaatgggctagaaagtgacagcagtagtgaaaagggcagaatcctagttgggaatcattttttccctctccttctaacaaagggaagttgctggcagataataaaagcttttgtggatatcatagtgttactacagagagacagtgtccaccaacagcaatcaagtatcccattgcaatgaagttgtatgatacaatttttttttaaattccaagaaatctagcaattaaaacaaggtatgtggtactttctgcactggttactgcagtactttgttccacatgagagctgtaaacatgtttattcttgtcagtgtttatgtgacttttgctcctatgatataaactttcgctgaactttcttgggggattgggatgatctcttgggaggacctcagcagatttgggcatgtacataattttgaattgagtgaccacaaagtacccattggcaaaggcttgatgccccctcagcacacacatgaactattttctaagcaagtgcttacttgtaatttaacattgccaagtcccccatccagctaaggtatatttatctagataagcagtcttcaaactagggtatgcatacccctggaggtgtaagacttcctaagagatacacaggttcagaagttaataccagtaattttctaattcctcaactttaatatattctactgcttgaaattgatttgcctgagaactctcctgtgagttttcctttcttacctcttctttctcacgcccttcttctactagataaaataaagacatatttcccttccacacagaatcttactatgtgctttagctgagtgtaatttcttgcccccaataaagggacaattcaaaatactgaggtaatactgaaaagtgaatgtataagtatcaaatcattctgcaagtcaggtggtttccaatttactgctttcaataaaatggaataaggatccaatcatgctgtcaattggtagataattaaaaataagttttaatgatagactgttaaaattatagattacttaataataaaccataaaaataactcttaataatagatcactatatgaattgccactaatgcagagagttcaaagatttgagtggtacagttgaaacaaagctctttcccatctattttcctaagtgagtaacactgctcagaggttccatctataaaaacaagtaagatagacctgctgatgatgtatttttaataaatgttcattttatgtaaataaacatttattaaactttataatataattaaataaatacattaatatttgtaataatcactcaatacagataaacttattttaaaggctgagccttatggtcataggaaattttaaaatttaaattgaacacatatgcttaattttgcaaacacatttttatggctgaaaagcataatagggtaatcaattttttaaagttaacataaaattatctgggggaagtagaatgaaaatataaattcaagataaaaaagtaataatgtgaaatttccatatgttaaggggttttcaatgtattttttagaaacagaaaatattgaatatcaattcactctgatatttagattctactggatatattaaaattttgtttactgagtatcaattcactctgatacttagattctattggatatattaaacaatttttacactatgccagaatgtataacctttgcaactatttgaacttgtgatgaaaacttttagatgtcaacttaaaaattgtctgagaggatacatggttttaaataattcttttaggaggtagaagtgtaaagtctgttgaccagtgatctagggcagggacagcaaaactagggccaaaggctgaatcctgcccatgcctgattttgtatatgtagttttattagaaaagagttatgttcattcatttcttttttatttatggtggcttttgtgctatactggtagagttaagaacagcttgagtttcccttatctgaaacacttgggaccagaagtgttttagatttcagatttttttttcagattttggaatattttcatagattgagatatcttggggatgatagccaagtctaaacacaaaattaatttgtttcatatagaatatatataatgtatatatatatatatatatatagcctgaaggtaattttatataatattttaaataattttgtgcctgacataaagtttggactgtgtttgaatgtgacctgtcacatgaggtcaggtgtggaattttccacttgtcttgtcacgttggtctttaaaaagtttcagagtttggagtatttggggcttgggatttgcagattagaggtgctcaacctaaaatatttactatctggccctttaccaaaaaagtttacccatgcttaccctaaagggttacaacaattgatgaattcatttaattagacttgatagcataggatattcattgtcaaggtgcaaagaaaatgatgggtctaaaattcagaaataatgctttaaatgactcagcaaatgggctttattattttcctgacttttaaactacccaagtgagcattttagtttttttaatatatggcaaatcatatctactcaaaacaaaacaagatttaagaaccagagtggtatttatccttcatgtagataattacgtattagatttctgattatacttggggaaatgataaatgaattggtttagagcttaaggttatttctgttcatcctgatagtctacctgctaatggtagccatttagctctccattgaaacaatgccttttaaagacaaaaatggtaactatataaagggaacatcttggattttaaaataataaatctgcttcattcatatgctttctttaaaaacattaaaattctaacaaatttatttgtgccaggaaaatctgacaaaattacaagccaaatatctatgccgatagcattacaccacaggtaggcaagtaagtttttattctaaaagttattaaataacatcttcaaaatcgaggcttaacattcttagtgatgccacatttgaaatccccacacgtaaggatgaaaaatgctaaactagagatttcgactaatctactcaaaaagcctaacagcaattaaatattctaagtcatctgctgcagatgctcatttcatcccaatggctctttctggtcgcctccctatttttttctcccctgaacaaatttaacctccaatggcaatttattgggctgtaggaccctaggaaaatgaatacaaatatcttaacactaccattggctgggcaatatatttcaactttgaaactgctctgcaattgcacattaatcccctcagactgaacagaaggtctaggaagaaaggattgatctcctttaatgatgaaaccctggcactacagttttatttttcataacgcagtgctgctaagaaccccactgttattatgaaaattttcctagcaaaggagctccatcacattaccggtgcaccaattcatcataacgtgccttgctcctgctcatcaacaagtctgagtgatgaaaagatccaatattatcctgacagtacttcatgcgcattctcaatcacacattattacagcatccatattaattttcagtgacacgcgtcctaggcctgttcaaattaggcaaaccaacgagggggagttgatgaaataccagcatagccacagctcattgcattccaatttgcatgcaaatggtttatcaggaaaattccattcccagcaaccagcaagtgaaaaacaactgtaatctacacttcagggccaccatacagagcttaatgaatcgcaaagagagaaggaagtgacagacctatgagaggatcgatttccactggcagctggtatggctggtcttgtacagcaccttgatgagctggaattcacaaaagataaagaaaaaaggcattattttttatatactaaactacataaaaatgcataagtcaaaccttatgtagaattgtttccaatctctaaatctttcatgcagttttgtgaaatttaaagaacaaaaatccaggtgcttttatggctagcttattaaacatttattttagattagtgccgctctgaactgtgccatcagcagtggctccagtcctaggccataagctatagcagatgcttgactggcaacctctgatgctgcaacaaaacaaaattaagtggtaaagcgcactgaaaacaaaatgtgacaaccatctgctgactgtagcaaatactatttttttgttacttcttaaaaaggcagttttgaatgctacagcacaaaggatctacaaaaatgtcaacttatgatggagaaagggaaagctctaagtcagggaacatttagtgtttcatccatcacttaaaatcaatcaattgaaagtttgaataaaaataaagaaagctatccgcagataaatgttttagttaaatgcatttggctgaaatattttcttaaagattggattgagggtttaaaaagaagttttattaatatttaatatttccatggtttcaatttaaaaatactctgagaaggagatgaataacaaaaatcaatctatcctaagaatactttgttcaattctcaaaatggttttaaagattcaggcatacttattttataattgaagagaggttttgcaggctgtttccctctgaaagggagaaggactttcggtagagaggaagtatatcaggaatcaggaactacctgatgcaaccttgtgcaaatcataaaccctaaaacagggttcagaatagattatcttttcagcttcatagttctgacagttaaattctgggcccttttccaaactattttccccaaacgactcagccattcaccctgctcagtatctactttttatagactcacaagcattcacattattgcttggttggtattagagctctgcttaatgccattgataccggtgggctaggggaggtccccaaacaccagtgggacctcaaccctggctcttgacactgtggtgagaagaaactcaaggacaagtcagaaaatagtgaaagtatggagatttattgcaaagcaaaaagtacacactcaaaaggggagtgtgggtgtactcaagagagagtcgtggacaaggggcgttggggttcctatctttatgggtttctgttaaccaaggggtggaatgttcatgaagattcctggaaaaaggtggcaatttctcagaactgtggtgccatccatttttacaccaaatatgagtgctcctggaacggtcatggccctggtgggtgtgtgatttgtatgttaatgagcatataatgaggtcctatgtgaaacctagatcaaactcagcaccatgttgggtccagacagtctcagccagcttggcctgcaccctggttttttcagggtcttatcagatcttagcttctgcagctatttcaacagtttccttttgatagtcaagaaactgctgcctggaattttctattctcctgtgattaccatatattattcctgtcttaccataagattttaggaaatctatctgtctttgaggggctgaaaataaatatggggtacatttcaataagttcattagattattttatacttactctgtcatagtttctccagttagtaaataccaactttttaaagatgtttggaaggtcattaatactgataaaacacctaagtacagtattggcactagaaattacagtatgtataagaaactaaagtagctgaagaaaagaaaccacaacggctcttttaaaaaaaacccaaaaggtatttgtctttgctgattactgtctctgctggcaaagaaatcacaggatactcacaagggaggaccaggaaaaatgcactacagcctctggtctacccaatagtgccacttacttccagcaataccagtgtcaatcaacattaatacctttagaatttccctctacttctctgataatctgagatcttagaaacatttaaaccaaactgtcagtgaaatgggtttaaggaggtttgctgatgcttcaaatcctacttctgccactgactggctgtatgaacttggtcaagttatgtaatctctatgtttcaatttcctgatctataaaataggttagattgaaccatatgaaattgccaataactgactgttttgacctataaaaaaacgcgatttcatatggtttcaacctaagtacagaacctacatcctcaggttgttaagaagattgagttaatacacataaaatgattaaaacactacttgaagaggcatgaaagtttatctactccagccatgttttgccagtgaggacactgagcccagggagctcgccttattctgcatcaaatatgcccagtcagtggcagagtttgagcccaggttttctcactcggattttatgaccacctctcccctctttcattagagcaggaaagttgggacctggattcagcactgttctttttggccaccagttagaattttttttaagaagaaggaaaatcttagaaactagaaaaatgctctataaacatttgctggtgttattctaatttttggaggttttcaagatcctttgaatgagaagggaggttaaagattatttattttctaaatcagacactactcaaagaactgaggggaaccagctgtctaatgaatgagctatggaaatcatagatcctcagaaaagaaacagaacctaaaattaaaaaaataaatattgtaatatggatttgatatttaccaaagaaaaactgtcagggatttttgatgtttgttttaaatcaaggcatagtgacaggtaaaggtagcaagagatagaatgaaaggttagatttatgtaaacatacctaaaatgaagcatagacttaatataataaacgcttaatattcttagttgcaggtgcagctcaaattggagatcacattctagaaagataactgcctgtggtgtattcccatatgttatcgctttttgtatttttctggtgaaaagttgctgtgtcatactgtaaaggcagtatgtatggaaagggtgaagacaaacatctctaatgacatggttatagacacaatgaaagctcactgaacagaaatataggcaagattctgcagaaccttgcagttcccctagctatcttacagaaaggtgagccaggactgggaacagttggatgcatcctaagtggtactccagcagtgagactctacccctaaatcactttacatatttatttatagaaaaattggaagtggagaagataatacctgaccactaggtattaagggaagcaagctttgtagtgagggacaccagcttgctggaaaggtgaaagccagaagcttagtcatcaacgcgtagggtcttaaatgcttagggttatcagtgctaaaacttgaaatcagctggagaccgaggagccctgtggttgagccagctcagttcccgttgagccagctcttcctaggctaaagtaaagatgggggcagagtacagtcagggctttccagcagttgcaaggtttgcccctcctcacatctgatgtcactctgtttaaactgaagaagctctcagggctgccacaaacagccacccaggataagcatcatcattggtggtcctgaagtcacacatgctggtgcaaagctctaagggtaaccgcacatagagtaggtaaatcctctagtgtatttgatagaacatatcaccagcatgtttttcttctaaaaagtgtttagagaaacaaaaaaatcacgtttcttaaataaattgtaatatttagtcccaaaatataagtatgttattttcataaatatttacttctgtaagagaagtttacttaaagaaaaaagaataaaaggacataataatagagatattaaatatctgcctccatttttactgtctctaccttttctgaaatctattttgtagtcaaatattggcatttatttgcatcgtttcatttccaatatacccaggaaaatggctatatttaatcaattctaataccaactacagattctttgtggtaggtataccttattgagcttagtcaatgtaccaagtttttgtttgaatgtcaattctgttcccttgtgaaagctgttgcatttaatttggcatgaggtccttgttcaagaacttgtatttttgcaaccatttcaggtattctaacgagcagtgctttatgcacacttcagagatttaatgacaatttcatgaactattaaaatgtatcttttaaatttgcctacctaaaacaacggcttgggaaaaaagtctataatctccagaagtttaaaagattttccttcttcttaaaaaaaattctaactggccaaagagaacagtgctaaatccaggtcccaactttcctgctctaatgagagagaatacattacagaggggtggtcataaaatctgagtgagaaaacctgggctcaaactccgccactgactgggcatatttgatgcagaataaggcgagctccctgggctcagtgtcctcactggcaaaacatggctggagtagataaactttcaatgcctctttaaatctgcactgtttatgattctaatggttatttcagttgagcatgactgtgttgagcatttaatggaagaacagaaggtacttacagatattcaatattttggctatgtaatttaagtgttcttttttttttctattatcctcaacaaatactaccaatactaccatgccaagcacaaaaaggtacagtttctggcacataatagacaatcagaattgtttactgtggctggacatagtggctcatgcctgtaatcccaacactttaagaggctgaggcaggaggactgcttgaggccaggagttcaagaccagcctgggcaacatagcgagcccatctctacgaaaagttaaaaaaaattagccaggcatggtgctgcgtgcctgtagtcctagctaatcaggaggctgaggcaggaggattgcttgtgcccaggagttcaaggctacagcgagctatgatcacaccactgcactccagcctgagtgacagagcaaggccttgtctctaaaaacaaacaaaaatttgtaaaaacccaagtgtttattaagtaaaatgaaagtaaaaaagagaaacatttgataaataaataaatatatactgtttatggacataatatagaatatcattatattaaaatactatattagaaacaatatttatctccaagaataaagataaaccaccagaagctaaaaagtagtttatgtttttaacatttgtactatatgcctcacgtgggccttttttaagcctttcaaactattaaacaatttgattcagactaatgcttgaaaattaaaagcttaaatgttgagatatgctatatttaagtgggtattacacagtgttcagcagttaccatgccttataatggtatttctttacttaccaggaaggttgtgccatttgttcaccgcaaataacctgttagcagtgactgtgatcacagcgggagttgccaaaccaggctgggtgttggctgccacgtgagtaacaggggagttggagggaaacttgaggaccatgataacatcctgctgggctttgtctgtgaacatcaatggactctgcaggaggagatactgttgagtgggcatgacaagacccaaatagacaagaaggaaaagatgaagaaagacaagaaagagagggggtgcaggaaaagaagaggaagaccatattaacatgagttgtaagtggaagcacagtgagcagaaaggcttgtagaaacagcagtcatgatctgttattcatgtatgtcgttagttggaattttgggggactgaagtagaatacattaacagaaacactttaaaatttataaattttatgagctccctttccctccccactgccacgaaaaactaaaagaatgatttgatttagattctacacaggcaaagtgctggggattgcattaaaccattctggttgctatcgtgtcacataatgatcttttagcactaaaaaaacagtaagaatggacaacaggcataaaagcaagacaaggtaatttccaaagatcatcaaaagttgtgttgagttagcaggaagattttgacaactacaaagaggtaatgaaaacaaatacatttataaacaatagttagactgcatgcatatattattacagtagagaaataacttatgaacgtaatatacaaacttaattataaaggtgtttgaaagcaatgcataaatgtacttgtaaaaacaatatatttatatagtgtaccaaatcataaacactgcctattgtaatgcaaatgctactgctttctgctgtagctaggaataaagagaaatacctaggtgttcctcttccctgttggttaaaaaacaaacaaaactagagctcaagacttttttgatttctccttcaaaaaacagagtaattgaaaatgttaaatgaaacactgtctgttctaataaccagcaaccaaataaatcttgaagactactaaggatttggaacattcttacaacccatatgtcataatccaagacatatataacactgctctgatttattggctttatttatactttgtggtggtgtgctatcatacagtaattgcactgtacattttcagcaattctctcctaccatgtctgttttctaatagctgattagtatcattcagaattgaaacactttgatgaaatgcttctggctgctttccttctgccatatttcaaaacaccaggtaatatgtaaatgtggaggcacatatatttaacacatatttattcagaactggtaataaaaaattaaatacatttgcatttttattatcagtccttttaaaaaagttattaagagtacttagaaaaacatattgcactaagaattcctatttgcactctttgcataaaggtgtaaataaaggcaactaataagctacccggacacccttctgagcaagtggctaaaagccaatcaatattatgagttaatcctccctggatgctcattcaattaaaggtgtcagtaatgcctcatctgatgtggcctcaattaagtccaactatctgatggtgtgaaaacacagggggatacagcaacagcagcaaaaccagacaaataggcagccttcgtgtgcctgctaattactacacctggtgtatattatggttcatgcacttaacgcagcacgaggtggctttaatttctgctatatttgtgtgtgtctctgtgtgtgtgtgtgtgtgtgtgtgtgtgtggggatgcattgatggttgatgggggagctcatctgaatgttactaaaaacaataaatatgtggcctttgatttttaaaaccctagtatcactagtttttgtcacacaaagaacgttttatatagtttttaaggaattctgtgaaattaggtaaaaatgagaaacagggagcaacatgaaggaaaatatcccataagctaattttaaagaagtcctgggaaaaggaaatgaacatcatttccaagtaccaagtcttatttttcaattatgtagtttttaaataatatttacgaaagtcaatttataaactcagagaaaatcagagtacaacataatcataaaatctcactgaaaggaagtacatacatatttctgagcttaacagctcatactataaatataattaggctcaaattgaatagttccaatgtttatgcccttaaaaaacacaaaaaaaatctctcatgtgtaggaagaatgtcttgtttacatagtgactctggtgggccaactctaagccacacggcaaggaccagccaccttccacagcaagctgcagacaccatgtccagaaatgtccactgccttcgtacaaatatctgtccctctagtctgctcctccataccccatcctgactagagctcctgatgcaggcaagtagcaggaaactctcttgggcgtttcatcatatatccttggctaaaaagcatgaatgagaaacaccagaaataagaaaaccataccccacactactaggctactctgcagtgacagcagcagctgcagatgagcagagcaactggtaaaacagggataagagaaacaaagcctcttttaatactgggtacctctgtgagccaaggctggggtacaagtaggaaattgctagccaggtttcatcagttttcccagattaagtatacatttgttgacaactctggtttctttttaaactgccttttccccatgcacatatggacaaagcgaaaaacacaatttgtgcaagtctgaagaggagttcaggtattcaattcagaggataaaggtaatggaaaagacggcctcccatccttatatgagcatgagccttccccgccttctcaccctcgggatagcaaagctgctctgcctgtatgagccaataagcctctgccatggaagaaggctgggcagtgaccccagcagaaagtcaatggagcagaggaggtgcttccatttgccagcaccaatgcagcctgagtctcaatggcaagctattactaaagctaattccaaatgcaaacataaatcattcttactatttttatggcactatcttccattgttcttgctaaatgtttgctatctatgtagtcttctgcccactaaagtcactcttcacgttcatctaaatctgattttactgatttaaaaacatgtaggggaaagagtgatgcaaacaatttttaaaatgtgtatagcttatgatggccaattcatactgctagataaagaaggagaaaaaatcttggaagaagaaagaaaatgacaaagagcacagagggaaaaaaagacacagaaggtgatgtgggaagagaaaggaaaaaaaaaaaggaaaaaagagccagaggtagcagggcctcctctctatttcttactttcttcactgctactctttccttcccagtatttatcaaaattctgctatctctacaccacaacatggaatttgactttatataattgttaattatatttacgggaacagactttgtagtttctattcttaatttaaaacagcaatgagcaacttctttttatgagggacaattgaaaaacaatatgtatagtctattccttaaaaattattttaatcacgcacttcaatttgttactctgccaatttttttttcctcattgaagaattttccccctgaaatttcaggaactataaaggtaaaatggccaccttattttgtagctcaagtctatttccgtacccatgattctgggctgacttttgacttgctttgaccaatgaaatgtggcataaatgatgtgtaggttcaaaagcaagcctcaagaagtctggctgcttctgtctgtcttcattctcatgggactgctcctaccatgggagcggcctggtctagcttccttaaggatgaaaggccacatggaaagagaagcctggctacatcagcccacccccaagcagtgtgtgagtgaggcgaggtgaaaagagcagaaaagattttcatctaaccctcagaatcatgagaaatacaatacatgattgttttaagccactaagttttgggtggtttgttataccaaaccatcatttttctcctcactgtggtccctgaccttcagtaacaatatcttatgtattagaatttgttttaaaattcccaaactgaaaaatatattgggatgtaaagaataaacacaacagcaaaactaatctagaaactcagagaatcaaaccagaaaagtcatcaaccctatgtctggagtcctttatcctacagtgaggattcatgacaattatggacctttcaattctgtaacacaagacaccaactgatgaaatacaagagcactggagcaacatttaccttctcaaagattccaggagacaatgcaataacatctgctggttgttagcaggttaacaaatattgcataaaaaaacaaacccacatatggtggagaaactcaagcacaatgaaagactgttatgaatatcaagcggatctgaaggagaggcaagaaatgaggagagtaaaaatagcacttaccacttgcatggcagaacctctgggaggatggggctctatgagtagttgagaaggagtctgtccaaaacttcggatttgagcttcaacagcctgaaaagggcaggggcaagtctgaaggttaagaggtgctaattacaggaaatagaaccccaactgtcacctgaaaatatcattccatactctggcttgtttcatgctgaaaatcaacctgtgttttcacagtggggctaaccacctggcaagggcattgagggtgaggtcatcatttagaaccgcagaagctgttcctctaaaactctgcaaaactttctcatcttgctcagtgatatgaaacagaaaccagctattacaatcagaaattgtcctttttggcttcatctctgttttcttgcacttggttttcctgcttgcatcatccccaatgatgaaaagctaatcttttacaggtatagagaaaaactattgcttctttgattctaggtcccatttcatcctggggagtaaaaaggaggaaaaaagaaacatagcacctgtgaaagtggcttgatgctatattaattttgccataggaagagcattattgttgactgtctctttgaagttagacaactaaataacaaagtaaaagccatatgttgcatctaagcatgagatggttaaaccagggagtcactaaacatgaggaacgtgtgtatgtgtgctctttttgaaagacgtgtgcttttgcaaggcactctcctactatggctcttggtgcacacatagcacacaaatgcccatttccatcaccaaccacccatcatgggaaactgctaaatgccaggtgctatcacatctgtaagcattgtgtttacttgtttatatctgtttcttcccagtaaaatacaaaagccatgaaagcaggaccttatgtatcttcttcactgttagatccctaaattggctgaatgaataaatgctacatgctgggtgaggggagagaaggaagcaaacacatataaaggctacttcgacactcccgtaacagtcagtatgcttaactcccaggctaaaaggatgaggaaaaccctcaaattaataagaataaaaattggagccaaaaggaagtgaggtagggactaggatcattttcagaacatcatctcaaatattttctgatagagtgaaattaatttatgattaaacatcaagaacaagcttgagaaaaaaatcataaaatgggaacctgaaggctaaaggtagtcacaaagaaggaggtagcaacactgctaatttatgatatatgaacttatggacttagtttatgaatgagaactttatatctttttgaagaacagctggtaaggatgggcatgatggctcacacctgtaatcccaaaccaagacaggaggatcgcttgaggccaggagttcaagaacggcctacatagtaagaccctgtctctacaaaaaataaagaaaattggctgggtgtgctggtgtgtgcctcaagtcccagatacttaggaggctgaagtaggagaacagcttgaggccaggagttcgaggcagcagtgagctatcattgcaccactgcactccagcctggacaagagtgcagcctggacaagagtacagcctgaacaagagtgcactgtacaagccagacctgtctccttgacagttgccttctgtggttcctgcccggcagcccacatgcctccctgattaaaaggggagggaggtggcaaagaacttattgcttcagcacttggcctatcatgtcagatggctcagagtgctaatcctgactgtgacacttatctgctgtttgactttaggcaattagcttatctccgtttcccatctacaaagagatagtaacaatacctagttcacataattgtttggaaaatgaaataagataatgcatataaagtgcttagcacagtacctagcacatacaaagcactaaataaaatgctgtactgtattattatttcatgtgggagttggtgtattccccacttaacacagctaaaataaagaaggaagaaatgcctcaggagtttatgtaggaagagaatgagaaatacattatttaagaaaactgaaatctggcttgggatttcaaaatataccacagggctaagagcctagagacagagagatttctttggaggttctgagagcagtccaaaacatgaggaattatacacctgggtccttatggaagctatggtaatagtaacaaagagatgaatatgtgaaccagctaaggaaaaatcaacaggtcttagggactgatgactttgagcaataaagaaaatacaaaactaattccttttcttaaaaaaaaacttgcatgtttcagagaatagtaaagcaatgagcagaaataggaatacaggagtttctgttagggaaaacaagtttggcaggagaaagacagtaaattttacgtcagacacatggaatccaacgtgatagtgataaccatttatctaggtcagtatgtccaatgtgtaaaagcctaagaatggctctgaggtgagagaagagaggtattgattttggtgtcattcatataaaagagaaatttaagttacttttttttttatctttctctcttgttgtatatgtgtgcatgtttttaagcagcagaaatgacctcctttttgaaatgaaatatcacatgaaacctcaatacatggagatagggttattcaactttacaggggtgaaaccatccctaacaagcctcctcatcagcctctgagacaattctgagaattctttagggctctggagcacagtttgaaactatactcgttaagccctaggatgaaaatacatgagacccagacacaaaagcacctagagcagaacctcaagaagtatttatatttagggtacaaatgaggaagtaatgaagaagacagagagagggcagtcagagggtgggtgggaggaaaagcagcatagagtgatatggaagccataggatgagggttttgaagagagaatgggcagtaacgccaactatgatagagaagctatgaatgatgacattgtagcatatacatctttattatagatacaaatttaatataactggccttaatattacatatagtgttttgcacttaacaatgttttgagatgaaaggttatggatgagacaacttctgaaaataccaatctcctctttttaactaacttaactttaatcttaacattttaatacaagtggcacattactgaaaactctgaggaaaaggcttttttaaatcacgtaatatagtggtctgattattctatctcaatgacagaataaaagctatagtctctcacacaggttaaataataatcaattttctttccaagtcttgaaggcatctgaaaaggctgtggaattctcagacacaaatgctttacttcttaacgaacctttcagttcttgatattaaaaatgcaacagaaaggactttttcaagtgtgaaaattatagaataagattgtaaggtaatgactatgatctcaaaactttatagtcacactgtatatcatcaactgataattccagttctcctccttgtttttaaaattcatttgccatttttcattcatcttaatctctgaagcaatttacagagattctcccttctgtggcttcaatggcttaatgcttagactggctctgtagtctactcctttaatctctgtcttttgctgacttgtcatccataaataaatttattactgtgagttctcttttagcactatgattcactcaacttaagcttgctttcttggaaattttttctactgggcctcaaactctgcccctatctgaaaggtttccagtcctatgaccagaggattgcccactcccatgaagtttgccctggccatcttgtgtgtaagcacatgtatgtcttagcacatctaaaatcttaaaatactattttttattttagcatttctcagtcaagaattagattcttctgattttttaaagctcagaatcttgtctacattttaaaaattttacctgtttcacatataaagtcactaagcccaatcacttcgaagtttatcacattcatcactcctttctgaatctaggccccttataatttcaagtatcgattattataacagtctctttgctggttttccccctctattcagtttctgcctccagcatatcctgcagaactaagttttcccaaactcgcctttatgcaatatttctctgatcaaatgtcttcaagtgattccagtaattaaaagataaaagctaatgccaggcattgcaggttttcctatctctctaacttttattctctcattctatctattaccttataccagtgttccttttcagtcaagctggttttcttctacaaatataagccatctctgccttacattttctaccatgccactgaccctcctagaatggtcactcttatcttcagttttctaagttctactcctctctagaaaaccctgtttgagttctaccaagtttccctaatcttgttaaataatattacacctgttcatactgctcattacagtatatacttgattcagaatttcctgtaatgttatttatgtctgtcactacaactacactataaggcactggtccccaaactttttggcaccagggactggtttcatggaagacagtttttccatggacctgcttggaggggtggatatggttttgggatgaaaccgttttacctgagatgaccaggcattagattctcatagggagcgtgcaaccgagatccctcgcatgtgcagttcacaatagggtttgcattccgatgacaatctaatgctgtggctgatgtgacaggggtagagctcaggcagtaatgcttgcccaccactcacctcctgctatgcagcctggttcctaacaggctgtggctcggcggtcagggacccctgctagaagggtctgaataccatatatgtgcaacaggtggaacagtaccttgcacatagtatttagacaacaaaaaatttactgagtgcctgttatatagcaagctagccaggaacccttatggctcatctatggttggactggggacaaaaccaagcttgagagatgagcacacttcttgatgagggctgactgaggttgcaggggaggataaggagtgttaagtaaaggctggtatttgctattagaaagaaaccaaatgagtctctcagggaagctctgaaagatgtcactaaaggcagtaattctcatttcttcagatccagcatactggaggataggacaacactccattgtctcactatagtagtaattcttaaggtcaagtgagaaatcctggggtaatatgtatgatttgaaaaagtccctcaagtgattatgtttcttgccttatcttcacttgcctattcagccctctatatagagcaataaaaaatttaaaggcataaatgaggtgtgaaataacaggaaacatacaagcatccttaaaccctgtacggttcagcaaggtgggttggtaatagggtagcttaacagacattaccaaatgcctcaactgctcttaatgaactctccttcacctagagagttttggtgctaggtgatcactttttagacattcagttatgtaacattttttgttatggaataggataatgaatccccacatatccattagccaccttcaataattattaagacattttggctttaggttatcttaaagtcgggtcaatctagacaatgtcctagatagattcattgaaaattaacagagtgcttctgcctttaaacaatttattttttttaacttctaatgcaagactatactgagaataaaagtatcttacaatgaccaaaaatataagcattagctggcagccttcatatttcttctaaggggctgaatatactcagacttgcaaggagatgttcaatccttaagttgcaaatttgattatgtgactcaaagccttccgttccaaatccttaccctgggtagcaccacagcataggattaagtatgcagacactggaatcagacagcctcagttcaaatcttaccactatcacatattagctcagtgattctgggcaaggtacttaaccttctgtgccttaatttcctcttctaaaaattgtgataataactgtcaatattttattgagttgtgaggattaaatgagataatataaagcacttagaacagttcatggcacatactaagctatcagtaagtgtgtgatattattacagcatatatattaaagacttaacacagtgcctggctagggttaagcaagcactcaataaatgttaccaactactcatctttaagatgaatagttatctagccccaaccactgtccatttcaccactctataatgtgacatataatcaacatcatattgcctttaaacccttgtatatattttctattccttttctctgtgtggtttctttcctcctcattcttgaagacttagctcaggcatctctggcctctgggagatctttcttgacctcacccagactgttgctgtccctccctttttgctcttgtagcaacatgcataaacttttactgcctatttatctaatattctaattactggtttaattttccaacttattgatcagactataagtctcctttagatcagagactgcctaatatttctgtgcttctacagcttggcacatagtaggtgctcagtaaatatttacccagtgaatgtccatgcaaatcaacttaatttaggagggatgcagctaagaaatgcactactaccacaatcacagagcagtctagtgttgaataaaatattatattaaaacatttcaaaaaaagcttgctttattaaatattcttattcatcaattcccaattatttctgtaaatagcctgttactactttctataataaaacctgaagtcagcaggcagcattccagatgttgagatatatagtaataaaaaagactatgcaaatacttcaagacattgcagtaaaaccacatatttatattttataaacagcatctcaaatattacctagagaatgtattaatggatcttcaaatggaaatattatgaagagattttcaacaagctgtgtattctatagtttttgtgtgtgccaactatttcatacttgcatgattttatagctatatatagaaaaagagacaatatatatagagagaatatacatacacatactagacagaatgaaaggaagaaagaaataagagataaaagtaaaggaaagtaaacttggcttagtgacagtgtagtatttggcttcaacttaacaaagactattttagtctctctgacctaggctttttaatctaactgaggaaacaagttaactcagtacagcacttagtaaccaacaataaatattgtaaaattttatttaagatgtagggtaggggagaaataacttaaacatatggacacaattaatatatatgcccttttttttaagcacacaactctgatattgtattttatcacctacatatttacatctgaacgcactataaaattggaatagggaaatagagacaaaataatttattaagaaaagatatgtcatttattaatatattaaaactttctcacattaccaaaattaagttcaagaaagctgctgtaagattctaatccacctctttaccaagaaatgtttaagcattccaacaagacttcatagattaaattcttttcaatatttaaaaagtcacactaagaccatccagtgatgtctactgtggtatcataccattacttgtgccagttttcttctttcccttcagatgtttgaacttaaattgtagaacacttgctggatatttgacaggtttctactcaaagtttactgtctagctgactagcctcagtgtcctttggaggtatggttcaactttagcttcgatatcagttaagtttaaaaacatattaatcaaatgactacttaatcatgatatggttacgtttgtatttaattcctaaaggaaaaaaatcctgataatattgtaactgctaaggccaaaaaaggacccatagcaagtaaatatatttggtaaaaatgggatgaaaatcccaaaagagaaaatcagagatgtttggatgacatctctatctggcttaaaagaaagaaaggcaaagcatcattagaaacatttggaaaccagactcccacttaaccttaggaaagaaatacaaagttattaatagtttttagttgtcagagcaataaattcacaaaattaaaaagtagtataatgaacctaactcaaattatttaaaaagagtcttctaagattaaaatgtaaatattttaaatgcctgagaaataaaatacagaattcaaactttataaagcataaacataagagataaatagtttttcaagaaaatggatacaccaggatatggaatatttaaaactcaagcagataaatgttcaaaatatacagcagaggatattttcaatgaaatttgcaaaataatctattaatacatagaagagtaaatgaaattcaacagaagtgattctatgtaaatttggacttgaaagacttaatgtttttagttttgagaatgcagacataaagacagatatctaagaatttagataaaagtcaagtttgtatgttatatatatgtatgtgtatatatatataacacacatatacttacatgtgttatgtgcatacatacatacatatgcatgaacacttgcatgcaaaatctggggggtatattccaaactattatttgctattttctctgatggaggaaggatgaaaagattggcagaataaaaatttatactttcctcatttttataccaattgatatcttacacaaagcatgtattatttttgaaataagcataacaaaacaattttcattttgaaaaaatctaaaagacaatttaaaaaaaaaggtctgcaaatatttggtatatcattattaagttttttttgttttgtcttggttttttttttttttttttgacagagtttcgctctgtcacccaggctggagtgtggtggtgcaaccttgtctcactgcaacctccgtctccgaggttcaagtgattctcctgcctcagcctccctggtagctggaattacaggtatgcaccaccacacctggctaaattttgtatttttagtagagatggggtttcgccatgttgtccaggctggtctcaaactcctgacttcaggtgatccgcctgcctcggcctcccaaagtgctgggattacaggcataagccaacacacccagccccacttctatgaattttcataaggaaagaatcagatgaagacaaaaagatttagatataaagaaagttattatagcactctataacagtaaaaattggaagaaaaaaactacttaaactctgataatggaatactatgcagccattaaaatgagttgaatacacctgacatagaaactagttcataatataccaaagaaagaaaaatttctaactaccaaagtatatagagtatgaccttatttcagcaaaaaatatatgtgtatgtgtggctgtgtatatatatatacacacatatatacatatatatatacacgtatatatgtgtatatatgtgtatatatatacgtatatatgtgtgtgtatatatatatacacacacatatacgtattatatatgtgtgtatatatatatatacacacacacatatatgtatatataaagcacttagaacagttcatggcacatactaagctatcagtaagtgtgtgatattattacagcatatatattaaagacttaacacagggcctggctagggttaagtaagcactcaataaatgtttttgtttttgtttcttttttgagataggatttcactttgtcacccaggctggagtgcagtgatatgatctcagctcactgcaacctctgtttcctgggtgcaagcgatcctcccacctcagcctctgagtagcagggagccacaggtgtgtgccaccatgcctggctgatttttgtatttttgtagagatggtgttttgccatgttgcccaggttggtcttgaactcctgagctcaaatgatctgcccgccttggcctcccaaagttctgggattacaagcctaagccaccacgcctggcgaagccactgtgcttggcctttatgaagtttaatttatccattaacataatagcaagaaatacatatatttttaacttttattttaggttcagaggtacatgtgaaggtgtgttacataggtaaacttgtgtcctgggggtttgtggtatagattatttcaccacccaggtattaagccccgtacccaatagttatcttttctgctcctctcccaaggaatattctgtaaccatctaagaacaacttcagttgataaactggtcaaaaacttaaatctatagaccttgctataaaattaattttgttaatattgagtttacttttttaacttatctgtatctgattccaaggatcccttagttttagcaatttttgccatcatttagtattaattaaatacaaacttgtttaagtaaataatgtgttttcctccaagaagcactcagaatgcatcaggtaactggaaacaaatacatatcatgatggaatggagtacataaaaaataaagagaaagagcagcttgttaaataaagtaaaacatattttaaaataataatgcaaagaaaagggggagaaggaaaattagggagggaaaggagtatttatactagcatatctactcaaataatattattatggaagttactaatgtaaaatatgatgtaattataatttgtgaaaatgcacacagatttttccattagtgcctgtaacggagcccgtacttttcaggcacattaaactgagtcccaacccagcctcactacaatctccagttcttgtagctgtccatctactacagcataatcccagctgccaatctgaaagaaaccagctagtcagagcagacacaaccaacagaaacaaacgtcactcaataatgttcagcggcactgtgttcatggataatttcaaacagtatctctgtctagaacattgatgtgctcattcaaaacacctccatctctggctactggaaatgagtagataaagcagcctgcctagaaaaataagtggaatgtcttcaaagaggttgccaatgctaagaagcaaatgttgagaaaacacagtaaaggtcttaaaggaaaaaaactcaacaatatccagagagttaattttcacattaagaaggttaaattatttctcaaaaccaaacaaatatgtttaaactatgtcatgaaaagcagcagtcattggttattcatttgctaagagtgacctagatgaagtaaagatggtgcctgaaaggaaacaggggttcatgacaaaagtcatcagtataatagaacggctcagaattctgtaggtagttaataggaaaaaaaatcataaaaatattaatattttgcttcatgtccttgagtgtataatttagttacacctaacttaactagtaagtctgcaaaagacataataatgagcaaaatacaaagagtagctttactgacaactttgatgctcatttaattgaataagggaatttttgtctgattattgtggttttgaagtaaaagaaagtctggcataattttatggtattttaaatgtaggttttcaattaaaacctgactaatccttaccgtttatttggcttctcattgtacagttcctgccctgcactgtgtcaaatatgccatctgtgtaacacacttttggccagaggtacttcatgattatttctataacactttgaattgtggctgcatgaaatcttaacttcggtattcaatactcctaatttactatattgctacaaccactgtaatcgtgtcctactcttaaatctcaccacagtcacaacaaagattcttgcgccacctgcttgaaacaggcttacagaccactcccccaactatttaacaaatgttaacaatgctataaatactaattgtgtttatgctttctgaaagattcactgcagccagtgttctgcagcagtgttggagctgctgactcccaccaacagactgatggaattctaagccaaaaatgcttttccttggataagatatctgatttgctactgctgtcatgaaactggggtcatgtaaacttaaacactgctgctgcttcttttggaaaacagacctcagagtgattacgcatagctaagacagcatttggaaggataaatttggaagagggaaaaccaaccactgacactaaacacaacttagggaaaattttcaggttttactttcatgttgaggtcacttgtatacagtaattctttaaactgggcaatatcacggctctcccctctcccctatttatcaatgcaaatagagctgagttccattttcaaaaggaaatttaaaactttaattaatttctgaactcacataaacataaaacaatgtatttacgtgaaaagtaaagaagaaaatgacacttttagaggaaatgtaccaagtacttataacaaagtacaagatgaaaaagcacagataatattgttcatattaaggttgtctgacagcaacatctacctgcaagtatctttcagcctttgaagccccaccccttcttccaacctccagtgtaccccaagatctgccctggtgtcccttatacaacaactgctccagcctctgctgtgtttgtacttttcctttgatcaaaacctactgtccagtcttactcacagacagccacatgattggaaaggatttttttttaaaggatttgtaaccaaataagtgatctctaatggtagaatttcaggcattaggaaaggacaatgagttctgtagcagaggctttttttctttacatacacatcaaagtgcatcaaagaggaacttatagctagacattaacatgtgactctggcattagttaccaatttgaggatgagagctttctagtctctcactttatactttttgtattatttgactcttgaaatagttaacatgtattgctttgataaatacatttttaaagcactttgtataactatttaattatacacacacacacacacacacacacacacaagtagtgaacccagagttctagaattcaggaatcttaagccaaaagccttcttgcttttagataatgacaaaaactacaattaacagcgatacacctaagatattttccctgaaagtagaagtgttctttgtgctctccctcaaatatgatgggaaaaatgaagaaataaactcaaatgttaaaaagtatgaaaactcccatagctcagtggattaaataacatatatagaaaattaagagattggaggtactctgatttctgagtgagataaaagttaagaaattgtaaattccttcattcctgtcaaagttacacgaagatcattatagacggtcagtaccctaacaacattgaatgttgagaaagaacatggccaaaacccagaacgcaattacaaaagacctctgaacagccaaaaacgaagtcagtattcatatcctcatgttaacatacattgcttgttcaaattttcaagaagcagattctttccccctgaaaagggagaaagagttgtgtttggctttttttctctctctgattttcaagagacataattttttagaatatagaaagaggcaaattaaagaattccatgatctcattaaccaaagataatgaccatgaacattttggggtccataattccagacttttcctcatgcatttgtattttatatgttccataacattgtctattattcactgtaatatggcaaaatattcttccatggtaatacatatagatttacacagcaacatttttgatgatacacagtattctactgtgtaaatttaccaatatttaattaactacttctctactggaaatttacgttgctccttttcctttttttttttttttgctattatgataatacggtttggctgcgtccctacccaaatctcatcttgaattgtagttcccacaatccccacatcgtgagaaggaccccgtcggaggtaactgaatcatggtggtggtttcccccatactattcttgtgatggtaagttctcacgagatctgatggttttataacgggcatcctccttcgctcagctctcattcttctctctcctgccgccttgcaaagaaggatatgtttgcttcccctttcaccatggctgtaagttccctgaggcctccctagccatgtggaactgagtcaattaaacctctttcctttagaattacccagtctcgggtatgtcctcatagcagcatgagaacagactaatacatatgaactatataactgaatatttttttcacacttggtcaattattacttttggttagagttctaagtaaatagtacatgaacattttaataattgatacagattgctataaagattcaacctattttcatcctcaccaaatatatgacagtatctgttttctcatactgcaccaacattaaaatttttattatttttaatcttagataatctagtggacacaaatgttattgtgtgttcaatttaatgtcattgattaatagtgaggatgaactacttctcttactgggtcctgctctttgcccaggctggtctcaaactcctgggcctaagcgatcctcccaccttggcctcccaaagcattggaattacaggtgtgaaccactgtgcccagcttaaagtgcttttcatatgtgacttgcatttcatctttcatgagttttctattcctgtactttgttatttgttgttgctttagatgtacagaaacatccttttcatgtagtgtttatacgtgaatatattaatttccttaaggatttttagctttgatattagacttacaaaggccttccccttcatgtaatcaggaacagaaatgtcagtgtgacaggacacatcgatgaggaagagaacagacgacatgagatcagggaggtatgcagggccagatcatgtgagtcaagcagattttattctatgtttgatgtgaaataggaaagtttaagaaggaagtgaaatgatctgacttacagtttcaaataccactttggcagctcggtggaaagtggactgtaggtaggcagggacagaaaaaggtgacctggtctactagcgttagtccagtggggagagtatggtggcggcttgaactaatgatgaacagatatgaatggtttccaaatatgttttagagatctcaccagcctagctgctcttttgagacagagtcttgctttgtcacccaggctagagtgcagtggtgtgatctgaactcactgcaacctctgcctccccagttcaaacaattctcattcctcagcctcctgagaagctggaactacaggcgcataccaccacgcctggctaattatttgtattttaatttttttaggaacagggtctcactatgttgcccaggctggtcttgaactcctgccctcaagcagtcctcctgcctcagcctcccaaagtgctgggattacaggtgtgagccaccttgcctggcctatcaccaacttcttatgctctcccttcctaccacacgattttttcaagtcatagagccatactgtgctcttttccacatgccatactctccgctttgaatgtcccttccatttcttttgcttcactgacttaactcaaatttcttaaggattatgttcagacagttgatactttcttaacctgggttagaaatgtctcctttgtgctcccgtattcagtgactgtcacattgccatatatataatatatatatatttatttacatacacacagacatatgcatatatgtgtattttttaaaaaaatatatttcttacctactaaacttcatcaatgaactatttcatactaagatactaatgtctagatagctttcaacctttgtatattgcaaatagcatttatatgaaaattaatgggtgaattctggataaggatatagaattgttctagaaaccatgcctatagatatgattatactttaaatatattaatttaaggaaaatacttatgttaaatcttttagaagagggaaaattattttataaaatattcatcatgtatttaatttgtggatttcgattttaagagaatttttttaattcgtaaaaatagttattcttactcatatctgaccctgagttcaaatattctaatttttatcttttttgaaaatttcttctttccttgggttttacgtttttcaaaaatggggttagaaaggcttaataagattgtgtttgaaagaaaagacatgaatgagccaaatcaaaatcagcagaataatcagaaaatgaccaacttttatttatttgtcccttatctataaaagaatatatgtaatattgaggaactagaatagattaaaaaaatgttaaaggcagtgaaaaaaagaatagtgccaaaatacagagaaataaagaagagtaaacagataaagataagactatattcttaagttggggtcacaagatattttttgaaagattagcatatttgtccgaaaaagaattctttctggtgtgtgatatatgtaaatgcagacatagttgtatattgataacccagctgttttctaaaaattaaaaacaacataaaagtttaatgtgctgcaggctgtttctctgattactcttcctcctcttatggttattatttctatcgtttagtgctctttttatagagagattatttttatgatcacttactatgccatgtgtattaaccattcattataaaatggaaactttctcaagaagaatggcgcttttcccaaaatagtaggtgattacatgacttgtatgtacacaacttgcctctgtatgactgggaacgtatttccagactgaattaagtgtatagaagtgaacagaaataagtaaaagtatagctactgaacagaaattagtctaatttgcttttgatactggaaaggtacaaatctatccttgtaccatgattgtggttttgcagaaataatgctttaatataaatcaagcagatatacaaatgtgctaatattaatgatattaaagcaccttagagaaacaagattctgaagaaaagagaggcgtggcctggaggtgggggtggggagtaaattagtagaaggcaatagtgaaagtttcacaactgacatgaagcctgtgacaagacttgacttggaggctgtcccaggctgggcactgcagggacatgcttggctgtgggagagcagtaggagctaactccctggtgcccttgtttagctgtactccgatcctaaagttttaaaggaaacactgtttatgaagacagagaggcagtcattaaccatcccttctaacagttctccaccctcacagcactttgtatcaccttacccacttctattttctttatagcacttgttataattgaaattacagtctttaaattttattttctgtgtgccccattagaatgtgagctccaggagggaacagactttgcctgtcttgctcatctccacatttttagcatcctgaacaaaacgaatatttgttgaataaatgaattagtaatgaataaaaggataaactttcccagtttatcactcccttccttcctttcttatctactcaatccagcccaggttcacgtttcatcttttctacaacatccctttaacagtttcatcagccacccttgcaccttcaatcctttttcatacatttcaccatacttccatggcaaaccccacctgtgtctatctttctgtctctctctccacaaacacacaggcgtgcacacacacacatccctctctgttcaacttttttctacacctattctcctgatgttgaaaacacagaaaaacaatattgaaaggaaattataattattgagcagcacccattaagtataaatattatctcatccttagcacaaaccctcataaacagaatcttgttgcctttccacctcattcatacacatttacttacacaagtccccatgctatccgtctactctccaatctgagatgaggccctattgttccctcctgttcagtgcttatctctatctatgctctgggttttgttcttctccactttcacacagagcttgatagtgtattacacactttctctcctgcatgtctgacatgcttccctccttttggatctttcccattaatatagaaacatagtccaatatttactcattaaaaaaaaattatcctttagagcaactgctggcgcatataaagatttctttttgtggtgacaaaaatgctcttaaattgtggtgatgcttgtacaactctgtgaatatactaaaaactatcataaactttaaatgggtgaattgtaacatatgtgaactatatctcaataaagcttaaattattttctttatttactgtgtttacttcaacatctcccattcataacacaatcctctactttctaagctatttctctaagatcaccaatgacctcttagaaaaatccagtcagtactttttagttcttatttgttcaatcttctttcagattctaaacaaacatattagtaacatggggctatgtcaccaaccttcagtggttccctactgccttatgatgcagttaaaagtattattttttaaagatagggtcttactctgtcgcccaggctggagtgcaatggcaggatcatagctcaatgcagcctccaactcctgggctcaagcaatcctctcatctcagctagggctatatgtatgtgccaccatgcccagataagtttttcatctttttgtagagatgaagtcttgctatgttgcccaggctggtcttgaactcccagcctgaagccattctcttgccttggcctccaaaagtgctggaattataggtgtgagccaccatgccctgctgaaaattatgttttatggtattgaagactgtttaagatctggctcctgtgtctctctctctctcatctgctaacctttacttcattccacatataccatattctctagccatctcttttatctatgtgcaggaagggtatgcagttgcctctgtgtaggtaacttctgctcatgactctacccaatgatcttattcatccttcaatatgcaactccagcctctcattctctggaaaacatgcctggattctgtcagtttgggcttagtacctatcctatgcttgtgcatacatacttacatatatttatctctgtactgaatttatcagattatattataattgtttagttacacttattttcccattagataatgaactctagctgagggagggcagggactttgcctttcaaccctttaaccttattacatgattcgggtttagtaaaaggttgttgaaaaaatgaataaattaatgacctattcatgttttctgctttcttgcctcacttaacaatgaactcagcatgcatccactaggaaatggtctctgataacttctctagtgttaatgttttatgattctttctatgatctaatcagtagttcatattccttttatagctgtgttttctaacccagggatttaactgtgagcaacataagggaaagaactaacacttgctgagtacttatgaggggataggcaccatgccaggcggtttacatgcattatatgtcatctcatcctctgtagagtgggcattatcgtatgacttctatatataggaaacagagtctgaggaacacaactagtaggcatcagggccatgactcaaattcaaatttatttatttgtttgtttctttgttcattctattatatcaaactgcattatactataggatttagcactggtaaatggtatgaaaaggctataataaaagactattcccctcaacctttttttttgagacagggtctcactctgttgctcaggctggattgccatggtacaatcatggctcactgcagccttgacctcctgggctcaagcaatcctcccacctcccacagcacccaatagctggaattataggtgtacaccaccacacccaaacaatttttaaatttgttgtggagatggggcctcactttgttgcccaggctgctcttgaacccctggactcaagtgatcctcctgccgtggccttccaaaatgctgggattacacgtgtaagccactgcgcctggccccatttattttaatgatattcagaaagttttataaattaaatgtgtgtatttattttaatagtgctaagtaacaaagcgatatattctcatttcaagaatatcaaatacctaccatacttagaatatcacaggccatgtttaataaatgccaaatctaatacagaatatatattatatataagtctatataatgtataatataaaaacaaattaaggtgtgatgtgtggaagactatcagttaaggcttaattttctcataattaactacttaggattgtggtaaagaaaaggaagtcaaacttaaagcaaaagttttaacggtctttagcaaaagttgatcataaaaaataaatattaaaaacttatctgtggccgggtgcggtggctcatgcctgtaatcccagcactgtggggggccaaggctggcagatcatgaggtcaggagttcgagaccagcctggctaatatggtaaaacccgtctctactaaaaatacaaaaattagccgggcatggtggtgcatgcctgtaatcccagctatccaggagactgaggcaggaaaatcacttgaacctgggaggcggaggttgcagtgagccaagattacaccattgcactccagcctggcaacaatgtgagactctgtctcaaaaaaaaaaaaaaaaaaaaaaaaaaaaaacacttatttgttatgatgcttcttcaaaaagttaaacttggaattatcacataatccagaaattccatttctgggtgtatatccaaaagaattgaaagcaggcatttgaacagatggtgtacatccatactcttggccacattgttcataatagccaaaagatggaaacaacccaaaatgcccattgatatataaatggataaacaaaatgtggtatatatatatacacaatggaatattactcagcctaaagagaaaggaaattgtgatacattctatagcatggacaaatcttgaagatattacgctaagtaaaataagctagacataaaaagacaaatgttgcagcattccacttctatgaggtattcagggtagtcaaatttatagagataaaaagtagcattgtaattgtacagggactggggaggaaggaatgaggagttattgtttaatgcttagagagtttcagtttgggaagatgaaacatttctagagatggatggtggtgatggctgtacaagaatgtcaatgttcttgatgccactgaactgtaaactcaaaaatggtaaaaatggccaggggcagtggctcaggtctgtaatcccagcactttgggaggccaagggaggcggatcacttgagttcaggagtttgagaccagcctgggcaacatggtgagaccccatctctactaaaaatacaaaaattagccaggcgtggtggcaggcacctgtaattccagctactcaggaggctgaggcaggagaatcacttgaacccaggaggcggaggttgtaatgagctgagcttgcgcaactgcactccagcctgggtgaaagagcgagactctgtctcaaaaaaaaaaaaaaaacaaaggtaaaaatgttcaattttatgttatatatatttatcacaataaacaattttatttgaaattataatgtgttagtttaggtgaaagaaaaaatataattgagcttacacctatattcaaatatatatctaatgtctacatggagtattcccactttgaaatatcctaccaagtcaatttaacatttatttttccattgtctgatcacatatgctgaactcagagtaagaaaagatggtcaaagacaaacataagtcttctaactctctgctgtacaatgctgtagcctctagtcatctgtgcctatttaaatttatattaattaaaattaagcatttagttccttagtcacactagccacatttcaatgtacaataactacatatggttcatggtttattagacagtgcagatagagaacatttccagcactgcagaaaattctagacagtgttcttctagattaacgcacagtaaacttccttaaacaatcattggtgtgtaagtggggacagtggtcaatccagaataaaaataaaaagccaagcacatagagtgactcatagaggaaataactagctgattgagtgtactacttgttaactagccatgacaaacagatataggccaagtgacatttttaatcatgaaaacattgcgtaacctttaatgaaaagtagagctacttatgtcatcttggacataccaagagacaagtcttttaagtaataggatcttgcattgagagaaacagtgttaagcatattttcacagcaactctatagaacattacagaatttcaaaattagaaatacggagattgcatatagtgacacaaaaaatatatactggcatagtaagtacaaccaatttatgctggtacaaaaaacaatatgctggtatattaaatacaaccaatctctttttaagaaattataaaatcagttctacagtgagaattcagttatatatcagctatgtagagatatggataattactacaggataacaggagaaaacaaaaatagctggtatatttgttgaagaattatgggcatttaacagaataaagtattacgttcaaatattgccaaaatgaacaaaaaaaagaaagtaaataggcctatgctattttatcccaacaataaaactatgcagtgttttgtaacactacctgtatgttgctctcacctcaatacctttatggaatcctatgtatattctgtgtcatacagtcaattgatgttctgatcaaataaaatacccccagaaggagtattttcaaaaaactgaacaactggaagagtctttaagagtttatgtgacccaattctctgctaccacagtttttaaaactgaaacatagcaatttaaaacttgggcaatttaatgcaagtgtacatctagtacacagtgcttttgtgtgcatgctaacttatctagcacataagccaggtgataatatgccaatttatttaaatatgtacttacataccttccgcatgatcagatcttagtagaactataaaagaatgcatcaagtgctagggaaaaatggcaaatctcacacattacaaataatgttcccttcaaagtgatatataacttgccccatgaatcaaagctcctggtttcctaaacgcagttgtgttctaaaattgtacagattaaggttgtatcattcaattctataatttttcatatgaagtatattggaattagaaggatgcataattagattagaaatactaaaaaaagtaaggtcttctacagactttttggtgagtgctgcatttgccaaaatcatgttttaagtgttttacttgagaaaataaatgacaagaataaaacaagttcaataacatctaacaacaatttgatcacataggaaagatttggacttcaacccccccattaacttctatgtggttatatatgttcttaggtattacatataaatatgtgttttatcacatttcaataaatttatgctcataatcatatctctttaatgaattattactattttcctacaaaaatcatgagtaacccccaaagttatataaaattataaataagattatttataccttaacaggttcaaatagaaaaagccgtcatcttatattgggtcaaacattttgttggaaggaacctctgggttcaagttcttgctaggtcactgataaattattctgcttaaggcactttacatctagtttcactttcttcatcactaaaatcaaaggatgggggaggtgttctctagctccttctagtttaaatatacctgactataagttgctttctcaattcagataacttacctctctcaacacaggatcagttattgaattcagattgacagctccttcataggtcaagtaatagaacacattgagggctcggacagcttctggtccttgctgtttatagccaaaaatgagatcaatccattggtgaagctggcaggaaacaaattcactctccagggcctgaaaaaaggtatacattgtattactatgctgaattcctttttaaaaatatagagagacatttagagcaatcagtaaagtttaacactaactttactgtgaacaaagatttttaaaaaacaaaacttgtggccgggcgcagtggctcacgcctataatcccagcactctgggaggccgaggtgggcagaccatgaggtcaggagtttgagaccagcttggccaacatggcgaaacccggtctctactaaaaatacaaaaattagctgggtgtggtggcctgcgcctgtaatcccagctattcaggaggctgaggcaggagaatcgcttgaacctgggaggcagaggttgcagtgaaccgagatcacgccacttcactccagcctggaaaagagcgaaactccatctcaaaaaaaaaaaaaagaaagaaacttatctgatgtcctagtttctaccagaatctgtcctccttggtttataattagaggctttccggcacttggcataattaattacaataaatgtgtaagtttcagtatttttctaccgtactgacagcactgaggaccaggactgggcctatcttggtcacatttgtaactcagggcctgacaggtactcgatttatgcttcaaagaaaggaagccatacaaggcaaagactattttgggaaactaaatgtgaaaatgttaaaaatttaccatccacttgaaatatttattatttttctagaattaaaatattttgtagtctatttcaacatgtttaaccaaattatttagttatgttgattgagttcttatgctaacaaattagattttgtgggggatacctataattactgaatttttattctaggtattaatatcaaacctgaccaaatatttgatgctattaacataatagtgtccaataaataacgaatgaacacaatcaagtatttggttgagatgctaggcacaagatccatttcctatccatcattatattcccagctacaagcgttgtgcctaaaacataatagatgccaataatgtttggtgaatttaataacgttataaatactaaagacttttaaaaactaaagatattttttaggaaactatccatctttatattatttaatattgttcaaaatcattccaacatcaaagtttagcattatggattagtttaacgataaataattatattaaaatcaaagagttttcaaacataaactctaaagcttaattaaaagtatacagtaggccgggcacggtggttcatgcctgtaatcccagcactttgggaggctgaggtgggcggatcacgaggtcaggagatcgagaccatcctggctaacacagtgaaaccctgtctctactaaaaatacaaaaaattagccgggcgtggtggcgggcgcctgtagtcccagctacccgggaggctgaggcaggagaatggcatgaacccaggaggtggagcttgcagtgagccgagatcgcgccactgcactccagcctgggtgacagagtgagactccgtctcaaaaaacaaaacaaaacaaaaaaactatacagtaatcccccctcatccacaggggtatgttcttcgaagacccccagtagatgcctgaatctgtgaatagtaccaaaccctatacctatatgtactatgttttttcctatacataaatacctatgataaagtttaatttataaattaggcacagtaagagataaacaacaataacaacaaaattgaacaatgatatactgtaaagaaaaaccataataaatgttatgtaaatatggtctctgtctctatctcaaagtatctgattgtactgtactcacacattttcagaccttggttaaacacaggtaactggaattctggaaagcaaaactgtggataaggaggagactgctgtaccaacttatatctggtaatgtatctcattgaaattgatttttatttttagagtagtaagtctatgattgtgatgtattttcagtatggcttgctgctatgttataagagatctgttggttttaaaacaaaactgaccaacttgtatagcaagtaaccaatgagacataaaccatcttgtgacaaaagacgttcctattcctttacatgtggacacttgtgtaaagatacgctttattaaaataagtgcctatgaaaaagaaatgtttatagctaaatacaaaaaaaatttcctttaatatttaacatagctttatgatatatcacaaatataaaattgaaaatataattttgtaaacaaaactctatgcaattctcacatcccaaagtatactttaaatgaaatatgccttaaaaatacttagctaggttcaattgagaaagttattgttttagacatctcttctaaaatgctttacatttacaaatttattaaacagatatgacagcacaaaactgcttcatattttacttgaaataagaagagaggagcttgtgataactttaagtaaatgcctattttaagtacataaatttgaaaaaaatctaggaactactaatgcaagttacacacagaaatgatacgttggtttcattaacttagaccttgggtagggatgggggtatggggtaggcacatttacaatgacacataaaaacagcaattgtcttaatttgtgtgcagtgcactctacacaaaagccctaaatatgttcaaattagagcaagctgcttgattgtcactgcagtctcatgtcacattaatgcatgacaaacattaaaccatacacttaaatggcaatttatatcatttaaatgtttactgccagactagctcatcactcatttaaatgtgactttctgacagctaatttcagttaattttctccaattcacttaattagaactttcaatcagggaaggacctatgcatatcttcaggcttacatcctttttggtggctgttcgaaatctgagttcataaactgccgaaaagctctactataatagattagcatataatatctctgagtttacaaaaaatatgactctatgaagagtatatactcacagtatatactcttagaaagaacttatacttatttatgtaaatagtactcttgccagtagtttaaataaaaaacgtgtagttcatatacacacactattgaaacaataaacaaaccctgcatccaagctaattaaaaattaatgatttcaaaattgtttaataagataaaacagtcaggagtctcctgagtgtccatggtgttgtgatttgagaccataaaattctagaaggctcagcaaatgacaaagtacaaatgaattttctcaatattaaagctctaaaaactagggcaattttattttatgtgtcaccaaacaaagaactgttgaattttccttacggttgactacttctttatgcacactcaaaatggtaaagttggttagatttcgatgcttaaagctttacatcttgatactgcatcagaattttaagcaaaaatgctgaaaggaaagctaccgtgtgctcatatcatgctgcaaacacacatgcagagatcaccacaatgccatggttcagacctcaccttacattgtcataggtcagtccttaaggagttgaccagtaattcgcggaactattggcaaaatcacttccagaagttgataaacacgttaccttcatgaatatactttaaataatttctcaaacactcaactaaaaattccattagtcagcttcaagcatgtcttgcaatataccaaagctttaaaaagggacctaaaagaacaaagtggtaagtataagagaattccaagaagtttcaaagtcatttcagtacaaagtcagctccgaactttaacatccttttgctatcagtgaatgacaactgcctaaccaaaagtaggtaatgcacttaagacttgaggggagagagaaggacaggcaggaagaaattaagggaaaaaatacaaacagaatgtaattcaaaatggaataccctgaggttgccttttataactcccatttttaagatttaaaaacataaatcataaaacctatattaaaatagcttttttatatattaagattttttaaaaaaattcttcatatatagaaaattctcatttagatctacatttttagttacaaaaaaatgaaaaatgccagtggaatgctgagcatttgagatttttcaaagccttcaaaaccgacagtcctcattaagcctggagttaaatacggtttgcagctaggggatagtaacattcttcccatgctgctctcaaacctaaccaatcaattgttagtactcccctagcaggctgcatacatcacttacatccaatgtgtgctctgagtaatatttgtaaaaaagaaaatccactaaaatgtccaacacaatataataatattcaactcatctgagttattataaaataaatcagtgactaatgtccaattgttaaggatcagataagactatgaaaagactatcatatgaagcctcacacgaatgttcaatccaatccagggggactcatattagtgttgacaaactgtcttggcgctgatatctgttttttttaatgagatctattaggcagagtaaaatacttcagatatgctaaaaagtacagtatacagatgtcaaatacacttattactaactttcatttgtttgttctgcatacagaatatcaacaaagttttaatattataaagataatagtaaattattcataaataggaggtttgtataaccctgtgtcagaaataattacaatatgtgtgtgtgtgtgtatatatatatgtgtgtgtctgtgtgcatgtttagcaaatctcactgaaagaacacaatctatgctttcctgaaactaactcacttaagaaatagattatttctttataaaaagtgttatataaaattattattttctatagtggagtcaaaaaatgtgataacatatagaaacagctttttccaagaaactctaagctatttgagaataaaaattctaaactaaaaggcattaactatgtatttaatctacacatgcattagtgatacactagcaatttccttttattttcaaaaaaccaaatttttgccaatgtaaaaatcaagaaaaccaatttcaatcaacaaaggaaattattagataattgtttacctcaagaccaagaaaccttatttgtttattatttatgtttctcatacttgtcattcccagcttaatgctaatatttacttattctttggctaaacattctcataccactccattaaaaaaagaaactaaataaaaactagcaatatctatgggataaatgatttttataaaaagttaaataaaaagatcaaatattctttatacactttttataaccagagagaataggcctaggcagcccagaaatacatttctgcacacctgtaccactacttccactcccaggcttctagaaggcccaaggtacaaaggttctgagatacaaaataccatagctgtaagtttcaaatgagaaaatgaaaatcactgattaaccctcctgacttgaaatacatttacttataagatgtatttaatcgtatttataatgaatgaaacatccattttgtaaaattttaattgtacttataattaagagtcttaattcatttgaacatagataacagtatgttttaaaggaactgacattgagattggcaaggcggtaatatacaaagttataaacttggaattttaagtatttttcattttaaatccatgtaatacggccttcttcctatacaaacacatatacacacagagatttaaaatgaactggtctgttatgtttgcatgtgttggatttcaaacactagtggtaatgtttccttaacattgatatatgacctttgtaatttacattgaagaaagctgtttttttcagcctaattagaactgtttcaaattttcctgctaaatatatgatataaagtcctttcaacttttttattctagagtttctttccatgtcaactttgttccaatcaaaatatgctttgaattaaatgattttgattgaatatgtggatcacatttcacttctaagatgtaaagtccaaaaaggaaaagtttagcctgttcaaacaaagcaagagcagccactttgcggaaagctattcacatttaagaagactgacaaattgtttgtgtgcaccattaggtctagtttctgcaatagttgccagatttcctgtccccctaataagatgcattaactccttaaatgctggctctgaatttgcagtgaatctgagttactttagcaaatttcaattttatctataggtaaatttccttatttgaaataaatctaaagaaaataaaagaaaatttgatgttaactatgttgtatcaaaattttctaacaaaggtcacagaaaattaacattttttcatattggttggatataaattcagaatacaaatatgttttctatatgtgacttgccagaagtgacaaattcacatcaatcctcatttaaaaaaaatgcatcaatttcactaatttaaagattacatcttcaggtaaaacacaatggaaatatttaataaactaaaatccatgaatatgagcatcaatttcctccacattgattatatataaaacacaatgcttcagagttcagctatttaccttaatatacatatatatataatgtgaaacaagctttatcctatttacaaagaaaagtttaattttgagagcttaaaaatatgtgtgaaattgtgacattaagatcaataagtcatgaagcccaagaaagtaaaaatggaggatcaaagatttagggaaaaaactgtgggatgctaagaataaaaattgtatcagacagttttaaaaaatgaaatttagtcaacaacatactgaagttcagcctgaaaagcagatagagaaatcactaaaaggggttctatacttctaaactgcccttgaactgttgggcagaagagatattttgagccagcagtacacagttcatttctacatttatatcattactaaagaaaagtgtgagttagtatcgtatcttgatataactatcaagcactcgtgcatcttttggcaggagaatcattctgtctacgattgttattgtgtagttttaaatggactagtcaaccagctgttatatattttatacactgaaggccatgtttcctttgaaattcatagttttaatctcaactgaagtctgtattgctgtgtgccaagatcaaaaggattagacaaacttgtacaattaccttcctttacagagagatgatttttaaaaaatgtttaaaatactcctatatactgacattttatccaactattttctttagaactacagaacattaaaacatttaattaacatttcaaccttaggtcacttttcatctaaaatctaggaattcacaacatacagatatgctaaactaattatagtatcacacacatagggatattgagcttttttttttttttaaaaaaaacctttagtttattaaaaatggatggggaaaaattatacctatttcttttatgtgtttgcattttgcaagcctttgctcagaaaataattcatagagcttacagtgatatatatgcagcaagatacaaaagagaagtgaggcaatgcaaaatttaaagggagatatcacataaaaactatgccatgaaatttcaaatacttgttttaacaaatctatatatgctgagccatgtatttgctgctaagctttctagcaggcaacataaagaaagaaacacgaacaattacaggagacaaaaatgaccataatgtaaaaacaaaccagatggcctggaaaaacacattatttctattcctgagataagaaattcctcccttggcaatatgatggaatccaggtatgtaactctcagagggactgagttaatcctgagatagatttaaagtatagacaaatggggagaccacatattcttcagataatcttgcacaaacattatttctcttagaaaggctttgaatggtaggttctagattgtgcttcatgacaagtacctggaattaagctattttattttgttagttaaatgcagagctaatatgctttgataacaggtaaactgagtcccaggactaataacctcctaagaatgtgaagagtataaggagaaggacacagcctgtatgaaaggcaggctcaccattacttggaaggtagactagcctgccttaaaacaggctcaaaggtaaactttctcacatagataaatatgcatcaaaaacttccaaattccaaacatgatgctgtaatatttatagacattaaaatgtttaaaacaggtatactagatgttcaactctttaaaaaattagtaaagtatccctagaaacttaatgttgaggactttatattgctgttatattttctaagataaactagttataaacatagacataagtaattaaaatattaatttaaagtggtcaattatccacctaggtatagaaaaatgaatgtttcctcttcagcagccatcacaaaatgtattaatttactgtatgaactcctgtaggttttatattatatagtcagttacaaaaggaaggaaaacaaaataaaaaaaatttaatcccttcccatttgcttatccatatagatctgataaatactagcagtctcttgcctttgaagatggccagaccagaatctctacttattgccagatgtagtttaatcccatgaggactccagacaaaaacaaggagctgtctgcatggcaccaatgattccctggactgactgccataaacttatactggcaaatcaaaatccttggcaaagtagaacatttattatgtcattactcctaagaatatccaataaagaaaaacttgaattaaaaaaaagcaaaagttgctgaatataaagcattaagttctgccagagaatcaaattacatctgcatttactttgtgtatgcgattgcatacttgtatattatataggactaaaagtattatacattctgcaactttctattaatgttagcatctctctcatctattcattcagtaaatatttattgagtggttactattggtcttgtgctagactctggggatactgaaatgagacatccctttggaagaaggaaaggggagcaaaaggtcagctctaagactactttcatagtctaagtgagaggtagtgagagccttaatcaagaaagtagcatccggagtgaagaggggacagagttcagaaagatttaagatacaagttattacttacagcaactgattaccagtgtgaggggtgaagaaaaaggaattttgggtgatcagtttgaaccttaaccatactagaggagaaattgtttacatggtagaagattagttgagttttgaacttagtattaatattttggacttccttttatagacttgaaattaaccctttgttttggatctaaggctgagaattttagtggaagtttgtacactattaaagtattaaaatatgtttgaccaggcgcagtgggttacacctgtaatcccagcactttgggaggccgaagcgggtggatcacgaggttaggagttcaagaccagcctggccaacacagtgaaaccccgtctctactaaaaatacaaaaaattagctgggcgtggtggcgcgcatctgtaatcccagctactcaggaggctgaggcaggagaatctcttgaatccgggaggtggaggttgcagtgagccaagatcacaccactgtactccagcctgggtgacagagcaagactccgtctcaaaaaaaaaagaaaaaaagaaaatatgctcatgttcaatagtggaatgcacaagccaaaaaaattctgtgtaacaaaatcaccccaaggattttataccagttttgtccaacagatatatatccatgccagatatgcaatttaaaattttctagtagccacatttttttaatttataaaaaattttttttaaaaaatgacacagggtctcgctgtgttgcccaggccagtcttgaactcctgagctcaagcaatcctcctgccttggccttccaaattgctgggattacaggcttaagtcaccatgcccagcctatagtagccacattttaaaaagtaaaaaaaaaaaaaaagtaaaactgttttaatgacatggtaatattttatcaagaatatacaaaatatcatttcaacatgtaatcaacatagaaattattttgtattaaatctcagaaatctggtatacattttacacttacaatggacagcacatgttgatcacactagccacatttcaagtgatcaacaaccacatgtgactagtggttatcaactggacggtgaggctttattcagttccaaatactgaatctgcatccagattttgatacaagacagaatgcaggagttaacaatacttaacacttttaaaatacaccttatcttactgaaaataaagataaaccttacaaagtacgaagtaactgccagactaaaatgaccttcaatgcagttttgaagaggccattacaattctcagtgccgtgaagaatggctacaccttaggaaatgacagcagaaatgtaacatcttcaagtgtgaaacagacataatgtcctacagtgtatattcttcagccatttatagatctctgaggaaatgtggcagcatctgaaagacggcattatgactatcctctaaataataaaggtaaaagggctaattctaccaactatgctgtaatctataaactttccatccttaaaggtccttagttagagttcttaaattttggctactcagctctatcagttatgtactttaagaattaccatatagccatagaccacaacttagtataggggacataatctttgctgaaagtcagatatatgacatctgtaatgtgtatgtattcacaaaactcataaaagacacttcattttagtagcagataacgagtctctgtctactcctagagattttttaacatctacaataacattctgattcccaaaattttgggtctgactctttctgcattttcgattaaataatgattagttaatagggtcagtcttttaaaattatttttaagtagccatgaatacatatgcaatatgaggtcaacaatagagacttcttgcaagagttaaatacatttcttatttatgtttccttacctccctttcacttcttaactagtttctcctctttctgttacaggcacaccactgaaaatgtttttgcaaagattactaactgtctgaatccagtgtatgctcatcttttctcatttcacctctgcattatggtgtttgtttctctttcttcttctcgcttgacactctctctccagattctctttctacatttctgattttcctattcattttcttaatatagggtctttttcctctaacatttcagcatttattctcctcaagattcagtcccaggccctctgcctctggtataacccaggctagatgagccacacttcaattacttcaaccaacaattactacctctctggagcttcaaatacaaaatgccaactgcccatcatactacttttttttttttttttgagacggagtctcactctgtcgcccaggctggagtgcagtggcgtgatctcagctcactgcaagctccgcctcccgggttcatgcccattctcctgcctcagtttcctgagtagctgggactataggcacccgccaccacgcctggctaatcttttgtattttttagtagagacggggtttcaccatgttagccaggatggtctcgatctcctgacctcatgatctgcccgcctcggcctcccaaagtgctgggattacaggcatgagccaccgcgcctcgcccatcacactactttttttggtgtgcttcacataactcaaaattaatatatcaaaaaccaaatgaatagtatttcctctgacacttgctccttttcttgtctttctggtgagggactaggtccttcatctagtcagccaattcagaaatgtggcagtcatcttgacttctcctttcccctctccctacaaaattttatcagacaataagcctcctaaatatcttcccaagtcattctttcttttcctttcactgggactacctttggtttcatgcttcatgatttctttgttcagttattctatcggtatccaaactgtttctttatctctaaaatttcccttttcaatccctcctccatatgaactgctatctaaaacctagccaagtcactgctctccttaaaacttttctcctttccctaaagcagtggatctccaactttaacacacaccaaaattagctggagaacttgttaaaacaggctccaatccacagtctctgtttcagtagatcaggggcagagtccaagaatttgcccttataacaagatctcaggtgatactgatgctgctggtccaggaactccttttggccaccacctccccaaagaaaaaagtccatactatttacgaggcattaaagatttatcgtacaatctgcctccagccatatatttccatacacaccacccacagttctctcaaacacatacttcagtctaccatctgaattaagtttagctcatgtggctgcatgcagtggctcatgcctgtattcccagcacactgggaggctgaggtaggtggatcacttgaacccagcagcttgagatcagcctggcagcctggcagcctgggcaacatgatgaatccccatctctactgaaaatacaaaaaaataaaaaataaaaaatagcaaggcatggtagagtgcttgtagtcccagctacttgggaggctcatgtgggaggatcacttgagcctgagcagttgaggctgcagtgaggtgtgattgtgccactgtatgccggcctgggtgacagagagagaccttgtctcaaaaaacaaagcaaaacaaaacaaaaaacagtttagctcatgtacagtactataaccttgatatctttgttcacagcgcttcttatatctgtaatgtccattccatcatcttactccctgcctggcaaacccctattcattctcaaagactaaggttacatatgggttccttggctaagccttcctcaaccttccccagaaacagaacaaggcatttcctcttttggtcccagaatatatatttattctctctctttctctctttgtgtctctctctacacataatgttaaatgctttcatggtaatcttgctactccttcatggtatatatacaagtatatttattatattacatgttatcacaagttatatatttgtttacttttttatttattatctatttcccttacaaaacaataaattccaaaagggcaggtactatataccatctttctcactgctgtataaccagtatgtagtaggtactcacaaaatatttgtagaatgaatgactatatcgcttaatctatttctctaattagttactgtcatgtctgtctgcttctcataatggcagccccaaagggcaggtgtcacagtcttccaattttgtgatcacagatctaattatccagtaggcccctaatacatgtctgttgaatgaatgaatggcatttaagaaattcttctgatttaccgcaattcaatgtctatgctgagggactagatcttaaagcactgtttaagaagcgtgaaattgaccatagccactttacttggttgatacagtgctggtttggcagagttatagaaaatttgaaaaatttctgtgattactagccactgcaaaatgagctgtctgcagtttgttaaccatacaatcaaatttgaggtagaatgattacatgggaaggaaaaaaaagtgaagtggatattaaagtatcatctttcaaggttttattttctcttcaatagtgtccagaagacagatgcaaatgatatccctaatacacttgacaaaagctcaagaaagtcagtatgttatgcaaagaaaatgcatctagaggtcaacttgggggaaatgcactgtccaactaaacaaccaccaccacactataacaataccagcagcatttaacatttagtgagtatttatgctgtgcccagctttatgctaaatgttttacatggactattttatttaatccttacaataatcctataagcaccacatttttaaaaactgttttacaaatgaagctaagaatgcttaagcaaattgtctgatgtcacagctagtaaatgtcagagttgtgacctgaacccagatttctctgactcctaaagccatattaaccacaacacatccttttgaaccaaagctgcaatatgaaaactctaaaaatatgaaaccactacataacatggattacttttcattggtttcacatatatcatttagaaatactagtaacaagtattgctgagtatatactaaatctggtgtgccatgttgatctggaggctttatttacaggttttactgttctttcaactggttttttgctttgacacatgcatttttaaaaccaatactttcaacttgtattacagcttatttttctcttttattaactggaatgtaagctcctagaaggtatagattatacctgtattcttggaactgagcatatagtagatgcccaataaatatttattgagctggataagaaatttatattctaggcctctttttcattaatgtaaccatatattcactataatattttatatcataataaaatatcataaaaatgtatatcataaatatatatcataatatatatacacacacagagagaaagtgtgtgtgtgtgtgagagagagagaaagagagagacagggtgtcactttgttactctggctggagtgcagtggtgtgaacacagctcactgcagcctcgacctcctgagctcaagtgatcatctggcttcagcctcccaagtagctggactacaagcatgccaccacacccggcgaatttttttatgttttgtagagacagagtttcaccatgttgcccaggctggtctcgaactcctggactcaagcaatctgcctgccttggcctcccaaagagatgggattacaggagtgagcaactgcacccggcctcattatgatattttaaaaataaacagcctttagagcaagacagagaatgataccaatatattagttgctaagtccaaagactcttaataaataaccaatccattaaacaaaaaaactattttaggaatagttaataataggagttcattctgcaaatttctaaacgtccatgacattagcaacttatgaaaatgtgattttaggctgggcacggtggctcacgcctgtaatctcaacattttgggaggtcaagatggacagatcacctgaggtcaagagttcgagaccagcctgaccaacatggagaaaccccatctctactaaaaatacaaaattagctgggcatggtggtgcatgactgtaatcccagctactcaggaggctgaggcaagagaatctcttgaaccagggagacagaggttgtggtgagctgagatcccaccattgcactccagcctgggtaacaagagtgaaactctgtctcaaaaaaaaaaaaaaaaaaaaagtgatttcatgtattttaatttctatattttgacacatgaactatttgatttccttaaatcaaactactatgcagaaataacagagaaaatttctgttatttcctacttaaacattttcatgtaactacccgattggttctacgtttctgttaatatttggaaaataccttaaatacttccacgtaataacactgctcaaactattcaaaatattgattagatttttttattttaaaaaatgtatagcacaaacattatttgtttttgtgattttaatatctcttaaatgtaccatttgacaaatgcttttaaattaaaatactataactgataagaaaaaacagtctcaaagaataaggctgttttgagattttttttaagcctttcagacaacccctatgatagctggtaagacatattagaatactataaaatatgagttagaatcactatctttattagattaggagaactgaataaaggacataactgtattcactctgaggctactattttcctcctttgttcttcaaaaatataactctttttgtagaatgtctaccactgtagttaaattcaactcataggatgcagttataggtcagaatctagcaaaatatattagaagcaatctaagcatttaaatttttcttaaatatgaggtgaaaagacaaacagcatggcaagagttaattgaaacattcctgtttgagagactgcatggaggagtgggggctggtggacagtgagaggagggagctaggccgagagatgcagagttaatcagggagcaaatccaaagccaggcatggataggcctcactaatgagcctcaagtaccctgcagtggttttcaaacttaactggcttcaaacgatgccaccccatgacagaatgcagctagccataagaggagggtgattagaataaatgactggagtaattaactctgatgtgaaaccacctgattggaaaagagaagccaagagctatttagctgatggtcctccagtagaaaaaggaagctttccctttctcttgtgtgggtgttcagttagaactcaactctttcaagtaggtatttggtagcactaatgaaaagcagctttcattcaagggcctctcaagggccttcccattcattttgaaaggggaagaaaataaaagcttcaaagtagaactaatttactttactcccctacctcttagtgaattttgcattagtgaagtctgcattagtatttatgctaacaaatttacctccaaataacgtcatcaaatactaaaaattttatttatagaataactagatattaaggctaattaaaattttttaaattttcctttctttaaaagtgttttagaaaactaaacttataatttataattaattgttgattagttacagcacttcctttactctagaatgagggagaagtaaaacataaatggggtacatctgtttttgaagagaaaccagagaataaggtggaggtaaggaaagaaagaacacatatttttgcaaaaagacagttttcttacagtgcaaattgagccaaagaatccaccacactctctggcctgctttattttataaaaagaggaattacaaagacttggggcattactgcctgctgttttacaagtaatcatcaattcattgggccaatgttgttctgtacctgctgagttaatgttcctcggcacacccctcccccaaaaacaggttcacaagctgcccagtaacaactacagcgtaagtagcacatgtaacttagcaaatgtttatgccgaaactcggatttatttgacagctttacacctttgggcatgatataattaaatgttttgacagctaaacaaaaactgtataaatttaaaagctattaggagctcagcatctagaatcaaaatgaagtaatttgcttataccctaagctacttttagtaatgcattccaataaaaagcatgaagaaagggataaatgtctatccgaatgttttagctaattcgttcatattcttctatgaagaatattctccttatactgataataaatggcatcttaaaaaggcaacataaacgcatttaagattgtcaatataatccctaaactctatctctggatattttctgtaactttagaaatggtaatattaaaaagacatagactaagaaatagtatattactgtatttttaaaaggccaccatgtgctataaaaaaggattgaaagcaacacagggacagtgaggtatccttcaaactcagccattaataactcaagggggttaatcctcattctctcaaggtgccggttccagattttcacaatatgctatgctgctgtagtcctccgagatttcagtgctcacttcataatacccccaattcacagtttaccttcggagaaaactactgttcattatctgagctccagaaaatgttcccatcagtggtactactttaacacaagatttaaaaactcagatacttccttaaaaaggaaaaaaaaatactataaagcaaaattgtccattaaactacaattttttagaaaatgaaaggttgttttatacccaccatatggcatcacattatcactctggacagcacatacagagtactggctaacagtctaacaaaagttaaatttaaacagcatctaagttagaacattactgaagcattttcaggctatgtatatacaaaaacatttaaaatttacttttcattatgtaacaatctaaggaatactgtatcttcactaaaggtaacaacgatcagttgtttatttaaaaaaacaaatcactaaaatgtttgaaaaccagtccacttttcatgtggatgtttatatttcacttaatcatccttcttggaaagacagctctaaaggaagaaaatactgagaaccaaatcctgtttaacttacacaaggtgatgtcaagtaatttaaaaaacatattctaaaaagagcttcttctgtacacatctaaagacattactgcattatctaattgttctcttcctctcactcatgttaacaggatagatgtctttttgtgtaccatatttggtttcactggcacatagcctgaaaacagattaaactgtttggagtgttcaaatatctgatggtgtatggactgtgggaataagagactggagactcagaagctgatagttcccaaacagctattttccttctttcttttttaaaaataaatgaaccttgagtcagattaattaaacactggttataagactcaatattcctagtagataaatagatgtttgaagacttagtcaatttcaggcccaaaagtaagtattactaggtgtaaaatttgtttaaaagatgtcattaaaatattacatattaaggtggtcctcttaatataatcttgatgtcttttaactatctcattctttctcttctccatggacatcatgttttgcaaaatgttatcaaataatcaaatgttataaaataatctcacaaagatgcatatatctgccagaccttctgattaggagataaccagtggtgctaacctgatataatttagctgaaagcacaagaaggttgaatttaacccaggttgcctttttataggtaaatgtactatgttcagaatgcttagaaattgctgtggtggctctaatggttcaacaacctttggctgagacccactgaacacatacaaacatatgatgcctaaaaaaatatactttttttttttagaccaaacacctttgtttcaggtactgctaagaaatataagagctgcaaaataattataacaaaatgcttacttatgcagaattttaactttagattcattgaaagaactatcaaactttttgacagattttgctaagtattgtacgtatataaaaaagaaaatataaatgaaatatttgtaaaatgtttgagagtctacctcttctgaaatgcttcctgattcaaaggtgttgatttctgtgtttctccatatagtactgtcctccatgcctttataagagcattagtgaggcagcattttttaaagagtcctccattattacatttgaacttttcttccaagtatcatactacaaattatgatgctgacatgttcttgatctttttgacagccttgtacacgtgccttagggctcccagtgctttcttcatgactgctcaatttctagcctcttctagtttaactatgatacttctatctcaacgcctccactgtgataactctatcttaaaacttaccaaaatacattaagaaataatgttttgtggagtggaagacagtttggcagtttcttacaaaactaaacattctcttaccatatgatctagcagttgcactctttggtacttacccaaatgagaggaaaatttatgctcacacaaaatccttaacataaatgcttacagaagttttattcacaattgccaaaagttggaaacaaccaagatatattttagtaggtgaatggataaacaaactatggtccatccatacaatggaatattattccaaaataaaaagaaatgagctatcaagtcacacaaagacatagaggaatcttaaatgcatgctactaaatgaaagaagccaatctgaaaaggttacatactatatgattccaactatatgatacattggaaaaggcaaaactatggggactataaaaagatcagtggttgccaggagtggaggaggaagggggaatgaataggtggagcataaggaatttttaggacagtaaaactattctgtatggtactatacatttgtcaaaacctacaggaagtctaacataaaagtgaaccctaatataaaccaaagactttagttaataataatgtattgatattggctcatcagttataacacagtaagtgtaccacactaatgcaagatgttaataatatggtgtactgagatgaggaatagtaagaggtatatatgagaactctctaaaggttctgctcaaattttctgtaagactaaaactgctccaaaaaataaaactgataattttttaaaacatgatgtttatatttttctcctcttctttgtcttccaaagaatatctcatgcctaagaaagttgctggcacatattatgggtttcaattgctactttctaaagcgaaaggagtatggaacccaaaagaaggatctcaaacccttcattcccaccaaatgtgccacggcctacagagaaagaagcattaattaacacatttaattaattaaactcacacttttcatatcacgtatatgaacatgttctagtatcaatattaatatataatctatctccttttcatagtaggttgaaaagcatgagctgcaagctactaaatttttttttttttttttttttttttttggagacagagtctcactctgtcacccagcctgcagtgcagtggcgtgatcccggctcactccaacccctgtctcctgggttcaagcgattctcctgactcagcctcctgagtagctgggattacagtcgcccgccaccacacctggctaatttttgtatttttagtaaagatggggtttcaccatgttggccaggctggtctcaaactcctgacctcaggtgatctgcctgcctcggtctccaaagtgtcagattacaggcacaagccaccgcgcctggccgcaagctactatttatctaatatttatatctcttattatgttcagggtactctggctgtgtcctgtgggataaagacaaatgaggcattctatacttgccctggaggaactccagtctaatggagacacaggaaaacaagtatgtccaaaggtacatggaaagcagagagctgagaacataaaacaagcttaagcaatattatataacttattttataaatatataatattaaataatgctattttctatatttgttaggtaaaaatgtgactcacatgaattaacactcaagataccataaagcttaaagttttaaatgctgtctatattcctatcctaaaaatatttcctcaaattatccttaaacaaattatgaactgcctttatgaagcatatttcattttcttcaattatttcagcctttggttcatagtcctattccttgtcatcattcttgatagcttcagcatttcatctaatggttcttctctggaagccttccttttctactcattttagccacttttaagcattaatgtacctttgatttaataagccatgtgattcaagtctgcatgaaccattatctcttattctatcagttaatttttctgtcagatgctcgttatgctaacttcttgtgactccttttagttcttaaattacaaagataatacaataaaaacaaccagtaagtgtttgcttactatttatttgagtactgtgataatttctataaataatatcaattaattctcaattttatgtctccaaagtaggtgcaccaaaccactacaccgtattttatttctgtataaaatattattgaaaatgttggctgggcatggtgacgcatgcctgtaatcccagcaatttgagaggctgaggtgggaggatcacttaagcccaggagttcaagaccagcctgagcaacatggcgaaacaccctctctacaaaaattagctgtatgtagtggcacacgcttgtggttccagctagtagggaggctgtgagcccagaccatgccactgcactccagcctgggtgacagagcaagatcccatctccaaaaaaaaaaaaaaaaaggaaaggaaaagaaaaaaaatccaaaagatctggagtcatagcctgggtaaaatggttttgaaatcttgggcaatacttaacttcttaaagcttcaatttattcctcatttaaatgtaaaaacaatatgttccttataaaatatccttattattaaattatatgcctggtacgcagtaagttcttactagatattagttctcctcctgtgatggccagcctccaagatggcccttgatgattttcatctcctatactaagtacagctgacctgtgtaagcaataagatagtgcagaggtgacagtgggagttcgaagactagtcataaaagatattgtggcttccctcctcctctcttttgaatcatttgatctgagaaatgctccatatggtgaggatactcaagcaatcctatggagagtgtcatgtggaactgaggcctcctgccaacatgtcaacaatgcgagacattttggaagcagatattccaccctcggtcatacattcagatgactgcagcctcagcaaacagcttgactacaatctcgtgtgtgtgtgtgtgtgtgtgtgtgtgtgtgtgtgtgtgtgtgtgtgtgagagagagagagagagagagagagagagactatgacccagagccacctagctaagccactctcaaatttcttactcaaagagactatgagaaaaaaaaaagaaatgtttattgttgttctagctgttgtatttttgagtaatttattacatagcaacaaacaaccaatacaactcctggtccatatttttctcagacctgctttacctgtttgaacccacactgaaccacatggtggttattttcaactaggtttttaagatgtaacctagactctcatcaacttgactgctctccatacctactttgttaatccctaatcttggtgaatcccatgatctaattttctggcttctacatatgggctgccataatttgttagagaaaaatcaaaacatatactaataattttactataaatccaagctatcttcagctgaccctcaaaatactcactatttttgtgtttctagttcactaacatcatatttccttcagtagctgccctcaattacacagctgccacactttccttctcagaagagtatctggctggcctttgacttcaaaatgaggacatcattaaatttttcttgatttttttcttctccattgcataatgtttatatttcaaccttacctctcctcttttccctgtgtttggagtagaaagtgttatccactttctatattaattcagtgccctcataccatctaaaaatatgctatgtactggttttcagtttctccccttctaagatattccttttctgagactattatctgctccagattctgctacctaaaaagaatttattctttaactccactaacatcccagaatcacctcttctttcatggacaccatacttctcaaaagccacgttcacccactctgtaatcttcactccttcactcaattccttgaaatctagattttaccacaaacactccatgaaaacttccaatactctcccttttatgtacggatgaaacgtttctccctctatgagagtgaactattgtggcagagactgctgttttttatctgctaaccactccttattttctttaataataaaaatttcacttagccagagacacatttccttgtctcccttataacctgataaggccatgtgctcaagttatggctaatgagatataaacagaagtaatgtgttccacttccagttgctcatctcaaaaggaatgggcatagttcctttccttcttcttactggctatgaagtagacccaccttgaacccagagatgggagtcacatgttatagctggaagattcattctcagcttcagactcctgctctctgtactattacatgagagaaaaacgagaagatataaatgatactgcaggttgggcatacctaatccaaaaattcaaaatacgaaatgctccaaagtctgaaatttttttgatcaccaacatgatgctaaaaggaaatgcttattgaagaatttcagatttcagatttttgaattagggatgctcaaccgtaagtatagtgcaaatattccaaaatgtaaaggaaatccaaaacctgaaatacttctggtcccaagcatttcaggtaagggatactcaactggtacatataacatatcaaaagtgtataattcttaagtatgtgaatgagaaatagtaagactccaaaatacagttgcttaaacatccgaaagaatagcttagcctgaaccataactaatatactcagtgtacggtcagggtcctagcaggaaacagaagacataatcagatgaaaatctgaagataatttaataaaggttctattcacaaaaagcatcaagggaaccaacaaactattttgagaaacctgcaggcttgtaacaacaagagggcatataacccataagcctgtaagagtaagggggggaattagtattactgaagctcgttgagtgctaaagctatagaagggaggctgtctggctgtagctgtagctttaactattgctgtagagggcctacagccctgaagcaggcaggaagcgggagcaagaaaaaatgtgaccccgttctcctcctgcagtcctgtctcctgtttttcatagtgatcagccctacaaggcataagggggacagaagggagttgtgggtaatgacctggggggtaatgctggaggataatcagaacacctattaataaattaaaagtgtattattacatcaggattggctacttttgaccacgctgaagcatatttttaaccatccaattcctcttgaaacagtctctctacttactttttttttgttttgagatggagtctcactatgtcacctaggctggaatgcagtggcatgatgtcggctcactgcaaactccgcctcccgagttcaagtggattctcctgcctcagcctcccgagtagctgggattacaggtgcgcaccaccacacctgtattttttttttttttgaatttttagtagagacgggatttcaccatgttggcctcaatctcctgacctcgtgatccgctttggcctcacaaagtgctgggattacaggtgtgagccaccaagcccagcctctacttactacttaacactaatgcactcttctatcactgctcctgataccattttataggttcctctttctcttcttgttttctgaaagaaaactatttcccagggctctgtttttggatttttgggctctatgtggtattgcagggtgaagtcataaaccctctatcttcgaccatcactcactatagataagcaccaaatctccatctctaacactgatctctcccctggagctagatcaaaggttgcatatttaagtatctatggaatccagataggtaaaaataattaattaggcaaacaatataacacattagagagagagaagggctgcagaaatctagaaagatatgcctacctatatctacaggggtggctattgctgagttccagttgattttactatgaagtaatgcaacccccacactgtgtctaacttttaaagaaaggctagaaatacagatttggaagaaggaaaggtgtccttattttactttttttttatggcaactccttttattaaaatattaggtagtttatctcagaaataaaattgaaatccctataactaaaaacactcagcagtgatgaataaaacaaaaatgtttttaggtcggcacaaaattgtggttttcgcctaaataaaataaaaccttttgattttgaaataagtttagacttccagaagaaatacaaaaatagtaaaagagttcaagtatatacccttcactcagcttcccctaatgttagcaacttatataatcaaagaaatattagcaaaaccagaaaatatgtactaaaccatggttgtaatgtgtaaccagcttttctccaatatcctttttctatcggaggacccaacccagaatcccacactgcatttagttgttgtgtctatcaattacaaaggaaaaaaaataacaaataagtttttaaatgaacactgtgttagaaagaaaacagcaaaagaaatccccaggagctataaacaaacaaacaattgtactacagagtggtaaagataaccccgggtgtttttgttttgttttgttttttcttttcttagtcaaagtcagctaggagtttgtttttaatgcccatatggaaaaagtagatgagaccttggctcctcttttaggttggtggaagtgaaatttccctatatataaacctgggaccctcaaagaaaccatgcccacagggaaaaggtcggggtgggagtgaggggaatctacctaccagtcaggacttaagaaaaagaggctgggtgtggtgactcatgcctgtaatcctactactttggaggccaaggtcggggataacctgagtccaggagttcaagaccagcctgagcaacatggcaagatcccatctccataaaaataatggaaaaaaaaaaaaaaaagaagctcttagtcttgacttgggcttaggataggaaaacttcccctaggaattcatatccacaggtctgtcccttatatagatttaggatttaaaagtataagcaagtagtctaaaatctacacagaaactggacctaggctttcaaacatggaagaggcaaaagcaaaaacactctggagaagcaactgtattcgtttatgcaatgctttgcacatgaaaacctggatctgtgattaagcatttaaggtaacactcataaaactatatcatttgcagtaaacatgtctaccaagtaaattaaaggacccttatactatgcagcagctaaagcaaagtaggatttgattaaaagtccttagaaatggaggactgttttaattctagaagtgggggaggagaaactcataccctttaactgactactacaagtctttctaagaactccagctttccataagacatgtacccacttaggagatcataggtcaggttttataatatactttataattaatataaaaaattaaccatgattataaatcaatgcctcatttataggagcctggagtctatcatacttgttttaaatgttttttataccaatttatttatttatttgttttgttttgtttttcttgccaacatggtgaaatcccatctctactaaaaatacaaaaaattagccaggcatggtggtaggcacctgtaatcccagctacttgggaggctgaggacctgggaaggggaggttgcagtgagcggagatcatgccactgcactccagcctgggggacagagtgagactctgtctcaaaaaaaaaaaaaaaatgccttgtccttgttggtacccatacccataccaggtaaacctatatttggtcacttgataatcacctgactttgcatgccttcttaaatgtcccatatcttgtcattctgaatagcattcaaaattatgttcatcagacgtaaatagatattttactaattagcatgatcccttacttcttatgtataagtgattgacagataatagctgactacctgccaatttggtttttgtactccattgagtataatacccctcctcaaggtaggaaatgttaagaattttttttctcatttactgctgtctgctgaactagacagctatctctaaaaggtacacaataataactgctgcttttcataaactgtttatagtcattcacagcctctatttcttctgtacgcaagtaaatcatgtttccagatgaaaatgaaaaatacttttattaatggcttttattatttttaaagtgctataatttcaaagatgttaattgtgtaaggatgtaaataaatgtaaactctccaggtcaattttcttaaaaggaagtccagatactaaaaacaacttcaggatgtaaaatgctgggaaacagcacgagcaactcatatgcatcagagacggaatcacattgtaagtaaaggtgttaggctgctctgtggacaggtaaagaagagccaaaacagctctggtaaacagaactcatagctaccatccaaaggtaagttaaacatacaggtaatgtagagaaagcctgccataaccacatgatgaaagcaagagcacaaacaaatgtcttcaaatcgaatgacaataatgttatgactatgactagtatgtaccttagcaatcactcagggaacagaaaaaaaatgatagattcagaatataaattcactaaaatgatttcttagctattttatactattatttatgtaataataatttgttatatattcttactattgtattaatttacccattaataaaagacactaacaataagccactacattaaaatagcagatcaggccaggcatggtggctcatgccgcctgtaataccagcactttgggaggccaaggcaggtggatcacctgaggtcaggagatcgagaccagcctggccaacatggtgaaaccctgcctctactaaaaatacaaaaattagctaggtgtggtggcgggcacctgtaatctcagctacttgggaggctgaggccagagaatcgtttgaacccgggaggcagaggttgtagtgagccgagatcacgccatcgcactccagcctgggcaacaagagggaaactctagctcaaaaaaaaaaaaaaaaaaaaaaagcagatcagaattcatcattaaattcctatatacaaaaattccataattagaaatatcaccagcagatacaaatttaaatatcaagtttgtattagaaaaaaaagaatgctggttggttaaaatggatagaagacagcaataatgagtcaggttataggttcaatcccatagagcccagctgggttcacattgagaaaagtacatttcatggtcaaagacaggtccctgatctcagcaaagggtcacacatctatgctattagttgaaaagggaattatactggagatggttcaaaaaacaaaaaactatcatcattacaggaaataactcatagcatacatcctgatgacaaatgaatagtgctattttctttgtgaataacatcttctgctgcactattactaactctaggaagatatgctggacttcttggctttgttttaacactatccacatatcatgaaatattatattgccgaggcagtatttatgaagccaaatagaaagcaaaccatgaactccatacataggaaaacaacaacaaagaattaatggctgggtgcaatggctcatgcctgtaatcccagcactttgggacaacgaggtgagaggatcacctgaggtcaggagttcaagaccagcctgaccaacatggagaaaccccatttctactactaaaaaaaaaaaaaaaaaaaaaaaaaattagccaggtatggtggcacacacttgtaatcccacctactcgggaggctgaggcaggagaatcacttgaacccaggaggcagaggttgcagtgagccgagatcacgccattgcactccagcctgggcaacaagagtgaaactctgtctcaaaaaaacaaaacaaaacaaaataaaaacaaaaaacaattaatgatcacaactctactcctcaatggcgcagggtcaacaccagcattagaacaacagggatcactcaactgtattctgaataatatttacaaagcacctgtgaactaattcttagcagttaagaatttttctttccccactatcattttcctcttgaaataaagcaaatttaaaatatgccaactaaggcaagagatttgaaccccacctacatcaggatcacctagggagttattccagggcttattccagaaaccaccagaaccaattttaataagtatggtgtagggccctgggatctgcattttaaacaaacactggaacactaaaagtttgagatgagaattactgactaaaaaaaaaaaaattgcagtttatgtagaatgcacacattagcaatataaaaggaaaagaagatgtctacttattattttctcttgtttatttttctaaattaagtatattttgttttaggccaggtgcagtggctcacacctgtaatcccagcactttaggaggctgaggagggtggattacctgagatcaggagttcaagaccagcctgaccaacatggtgaaaccccgtctctactaaaaatacaaaaaaaaaaattagccaggtgaggtggcgggtgcctgtaatctcaactacttgggaggctgaggcaggagaatcacttgaactggggaggcgggggttgcagtgagccaagattgcaccattgcattccagcctgggcaacaagagcgaaactccatctcaaaaaaaaaaaaaaaaaaaaaaaaaagtatattttgtttttaacttagaactatttaatattccttaggaaatagttcaacaagccgaatttaagtggtctctccataaaggcacttacatgatttacacttcaaaactactgaattttttaaaaccacttaaattccttcatacaatttttgaattaaaatgacaagtgtggcttctttttcaacatttaaatataactcacataccacagaattcatcctttaaagtgtacaattctgtggttttcagtattatcacaaagctgtgcaaacatcaccattaaattcagagccctttcatcacaccaaaaagaaactccgtacctatatggcactcactcccatttccctcaccctcacaccctgacaaccactaatctactctgtatttctatggatttgtctattctggatattttgtataagtggaatcatacaatatgtggcttttatgtctggattatttaacttagcatcatgttttcatggttcatgctgtagcatgtctcactatttcacttctgtttatggctgaataatcttcagcatatggatacaccatattgtgttaatccattattaattatttggtaggcatttgggttgtttctactttttggctactatgactaatgctgctataaacattaatgaatatgtttttgtatggatatgtttccaattatcttggatatacatataaccaagagtggaattgctgggtcacacggtaactcaatgtaaagaatgtgcaccattttacattcccaagagtaatgcctgagggttacagtttttacatatcttaaccaatacttgttattgtctgtctttttgctagtggttgtgaagtggtatctcacgtgaggtggtgtgatttgcatttctccatgactactaatgttaacatattttcacgtgccttttggccattcagatatcttcttgggaggaatgtctattcaaatcctttgcccagtttttcattagactatttatcttcttattcttgagttgtaagagtcccttatataatctgcatagtagactcttaccaaatatatgatttgcaaatattttctcccattctatggattgtcttttcactttccaagtccagtttatttatttttgtttttgaggctttggtactgtatataggaagccattgcctaatcagtgtgattcactacttttattttttacaaaatgaatattttagtaaaaattggctctagcctatcattagcaggagagtagccttgcagtcttgttttgtgtcaatagagatttgctagaaaactgaaactgagtaagaaaccattctggggctgggcacggtggctcatgcctgtaatcttagcactttgggaggttaaggtgggtggatcacttgaggctgtgagttcaagaccagcctagccaacacggtgaaaccccatcctactaaaaatacaaaaattagctgggcatggtggcacatgcctgtagtcgcagctactcaggaggccgaggcaagagaatcgcttgagcctgggaggcagaggctgcagtgagctgagactgtgccactgcactccagcctgggtgacagagtgagactctgtttcaaaaaaaaaaaaaaagaagaccaggctctgaaaagttagtttgcaaatattcacaggctttttgtgctttttcaaggcaaactaaaccaatagtttctaaggtagttatttaactaaatttaaattaacatagatcttcaaaagccaaaagtagtgaagaacttaaactggattgtaaaaaaacatagaaataaaaatgaaaaacatggtctaaactactgacaaaatattttttcaaatttctaacactcataaggacaaacaaccttctgaggacaataacaaatatagaaataaattgcaaaatttttgtgggctgctaaagtggtggtaaacaagtactgaaatatgccaagattatttgtttataacatttactacttcagctttcatcaggtttatgaatatttatttgttttaaaatatatccccaaaaagatacttaatagcccatttcagaactagcacatcttatggatgattaacattagcaaggaagagtactgcctacagaaatctgatagtagtgctcaaagtagtactaagtacactgttctttaaaaatatgcttattaacgtcaccaaaggaaaggttgcttaaaatataattatcagtttttagtcaatcttttcttttcttttttgagacagtctcgctttgtcacccaggctggagtgcagtggcgcaatcatggctcactgcagcctcaacttcccagggtcaagtgatcctcccacttcagcctcccaagtagctgggactacaggtgtgtagaaccaccatgtctggctaattttttattttaatttctgtagagatgaggtctcactatgttgcccaggctggtcttgaacttctggactcaagtgatcctcctccttggcctcccaaagtgctggggttacaggggtaaaccactgcacccccaattttgtatagataacttaaaaacaaacacactttttttgagaacataaagtgttttagatagtattggaagtctgccacgcaggtatcatatcgctcttgtgtgacaggtgtatttcagggaaatgtatatgaataagatgtatataaaagaccaagagcatcactgttgtgtccccagtgcttgtagtactgaacaagcttaacaaaatgcaagtagcaactgctaacttcctgagggcagaaatttaaaaaaagccttacgttagaacaagacactctcaaaaagaatgtctaaatgctaaaattgctaatacccatccatctgcctccaggtggtgaaaaaggggagtgtgtatagcattacagtctggcaggggtaatatatgtagctttaaaagcatattcaaattattataatattctattgtttattggctccttaatacaaacattaaggaacagtttttttatttttattttttatttatttatttatttattttgagacagagttttgttcttgttgcccaggctggagtgcaatgtgcgatctcagctcaccgcaacctccatctcccgggttcaagcgattctcctgcctcagtcttccgagtagctgggattacaggcatgcaccaccatgcccggcaaattttgtatttttagtagagatggggttcctccgtgttggttggactggtcttgaactcccgacctcaggtgatccgcccacctcagcttcccaaagtgctgggattacaggcctgagtcactgagcccggcccagtgtgtattttttacatctatataaaaggttgtgaaactgataaataaagccttcttttctaaagagatttaaattcaggacatttaagaatgtgaaaagcagatcctcttctttcctgatcctcctttcttatgctctgcaaaggagtaagagtggctgactcctagttaaggttatgaaacagcatctaacttcttatgggctaatgcttcctttaaacttagacccagcattaaacctcacaaactaaataaaaataccttcagggaattacgatgagaagggcattttgtatctttaaaatacagacctaattgtggaggtagagtaaaacaatatatattttggttaaataaggctagagaaaaagaattcacaatttgttggatttataaaatacaaactttaatttcttttttttttttcagaggaaagaattaagattagggaaatgagaggaggaaggagataagggctttaaatgattctgatctataattatcagtatgaatttttcatgtttttcttttgcagacatttggaattgtcctgtagattttgttggcagttaatgatcgaggcctgcagagcactgttactgttcttgatcccccaattcataggtataatctttatgtcctaaactattggtcataaatattagttagctaagaatgcctaaaagttgtttacaaaccattacttgaaaaatgaacagccaacatttatagcatattcagagaaagttagtttgaaaaataactcaaactgtgtattcgaatcattgtatgtaaaaaaataaataaataaaaataaaagtagcttttcttttccttgtaaaacattagctagaaaaagattttacttttttcccacatcacagatcatcttgaatgagcaggcctgcataaaaacgatcttcacaactctttatgtaaaagcacaaaaaaaacaaaaacacaaacctatacacttttaatacaaaaaatctgcattatagccataaaggggcgaatagaccagtcataaaaaataaactcgttttttagttgatccaatcttgagcaaatgtttaattttaaaatttactattgttttattttctattacaagtatctgcctaattctggggcatctgctatactaaaagcagaaaaaaatcatttgggagattaaagagagtaagagaaaaataaaaggagagtcaaggaaatggatgggtaggaaaaagaaaaaagaaagatgaacagacagaggaagaagggaagagggggcaaattggcttagtcaagctctcttgggacagtgtgctgagttaccagaccagaaatgaggggttgaaagctactactgataactggtgcaggctgaaagtgctacttaagtgcctggtgtctgtggaaaaaagagggaggagaggtttaagactaaggatgccaagtacatttccagccagcagagtaaaaaggaagcattaacagtagcctcaggggaagctaagcatgctatcccatgagccagagggcaaatgtggcaatagcagtaagtagcagctggataaagggataaagaaataaagaaaccacaggaaaattggcagctttagacccataaggctgactcggcctcgtctagatacttagaggaacaaacagcctggaaaaaacactgccatctttctactgccgatgggttactaatcaacaactgaggtgcaatcaactaaaatttacttggcaaaaattatattaagcatggatttaactttgtggaacagaagctctgctcagaagatacatgtaagatattctcagtatttggcatcataataatcaaaatcagcattctccataactctccaaatgatactccgaaatgtttaaaatgaaaaaaaaaattaaatacctttttctaatgcagtatttcattaatgttttctaaatattatttcatacctcatagtttaacaaatttaaaaaggatacacataaatatgctctatagtatatattagtgaccctttgagtattaagcccagcctccattagctattcttcctgatgttttccttcctcccaccccccaccctccaagaggccccagtgtgtgttgttcccctccccctgtccatgtgttctcatcattcagcttccacttctaggtgagagcacgtgctatttggttttctcttcctgcattagtttgctgaggataatggcctccagctccacccatgtccctgcaaaagacatgatctcattcttttttatggctgcatactattccatggagtatatgtaccacattttctttatccagtctatcagtgatgggcatttaggttgattccatgcctttgctattgtgaacagtgctgcaatgaacatccatgcagacgtatatttataatagtataacatattcctttgggtatatacccagtaatgggattgctgggtcaaatggtgtgtctgcctctaggtctttgaggaataaccatactgtcttcaacaatggttgaactaatttatactcctaccaacagtgtaagagcattcctttttctacacaacctcgccagcatctgttgctttttgactttttaataatagccattctgactggtgtgagatggtatctcattgtgggtttgatttgcatttctctaatgatcagtgatgttgagctttttttcacaagctttttggccacatgtatgtcttcttttgagaagtgtcttttcaagtcctttgcccactttttaattttttttttgtaaatttgtttaagttccttgtagatgctaaatattagacctttgtcagatggatagattgcaaaaattttcccccattccataggttgtctgttcactctgtggatagtttcttttgctgtcaaattattttcattcatattcttccattaaaaaaaggttcaaagttatgtcataaggcaatctatattacctttatatggttttagaatggaaggtaaataccacaatgagagttcttgttttaaataagtatgtgctgtaatattttagtataatatccgaaaataagatttaccaagcacaacatttttcaaatgactaggcttgatatatttgataaactgcaatttgtaattgattaaataaaccctgttggcctaagagttgctcaattctctcttttcttcatcagggttattaaggtattataagattgatgttatgaaaaaagatcctactcctaaaagaatttcaaacatttaaggaaatcaaactgaaaagtaagaaatgccaattaagttgtgcaatgtatataacaaattctataagaattcaaggggtgaggagggggtggagtcagggaaaaaagttcctaagggatgtaaaatttaagatggctcctaaaccatgcataacatttgagcaaaaattatttggaaggaaaagatataaaaagagtaagttaagaagcagatacttcaataaagcaactgtaattactaaagttacctttggaaaattaagatttgacagctattacaggtagagtatagaagggatagaaggtaaagagagtgatgatacatagaaagtcatgatactaaagtagaataaaagactcggggtgttttagtctgctctggctgccataataaaatacctcagattgtgtggcttaaacatgagaaatctagttctgaaggctgaattaatttagaatttctgaaagctgaaaagtccaagatcaaggttcccataagatttggtttatgatgagcactctcctcctactgtgccctcacatgatagagagagagtgatctctggtaacccttcctctttcataaagacaccagttctactggaacagggctccgcccttacgacctcatttaaccttaatcacttccttaaagaatctatctccaatacaatcacaggggtgtaattagggctccaacataattttcgggggacacaattcaggccatagcattctgcctctaacctcctaaaattcatgcctttatcacacgcaaaatgcattaattccatcccaaatgcctccaaagttttaacccattccaaggtcaactctaaagtctacagttcaaagtctcatctaaatatcatctaactcagacatgggtgaaacttgaggtacgaatcatctttaggcaaaattccttcccagttgtgaacctctgaagtcagacagattatttgtttccaaaatacagtggtggggcagatataggatagacattctcattctaaatagaagaagtaggaaattgtgatataattttttaaaagcctgttgggagcattaagtgagattacatacaataaagtgcttaaactagttcatgaatatcagcagagtagaagtataaactccaagaaggcagggactttatcatcaaccactgtatctcaagagttgcacagtcaatagggtagtcactagccaaatgaagctatttaaatttaaatttaagttaattaaaactaaaaattcagttcctcagtaatattactcacacttcaagtgctcaatagccacatgtggctagtgggtacaataatggaccatgcaggtttccatcaccacagaaatattagtagacaagtctgttctagagcctagaaaagtatgtgacactataattattgaatgaagaaatataaaaactattagcattcatggttcaagaagaataacaagaaaacatcaagaagaatgagtatcttcaattttggatctttgtaaaagatccaaaagaatcacaacacaagattatcttattaacttttataaaggcagtaaatttagggctaggaaaatgccaattaagaaatatttctgtagccaggtgtggtgacacgtgcctgtagtcccagctcaggaggctgaggtgggaggattgcttgagcccaggaggttggggatgcagtgagccatggttgtaccactgcactccagcctgaacaacagagtgagactcagtctctaaataaataaataaataaataaataaatactccataggagattaggttaatattgttcagagttttgctttgttatgacctgaatcaagagaggaatcaagagaggaatcaggaggctgaggtgggcagattgcttgaggccaggagttcgaggccagcctggccaacacatggcgaaaccccatctctactaaaaatacaaaaattagccaggcgtggtggcacatgcttgtaatcccaactttttgggaggctgaggctgcagtgagccaggatcacgccactgcactccagcctgggtgacagagcaagactctgtctcaaaaaaaaaaaaaaaaaaaaagaaaggaatcaaaactccagagactaaccatgaacatgtctaatagtctcactcttaggcaccagcagtcttactaaatttgttagtggcaggatcaataatgaatggattcaccaacaaattcctatggtacataatgtcagtgttgtcggcaacaaatgtgagacaatccattgtgaatacagagatctggacttccatttttgtctgggtatttttttttttttttttttttttgccagtggatgagaaggaacggagtatctgcaactaacatcaatatttattcagaaaagtgcttcttatctttttaagcacttggaaacacaccaagttctgttccattacatggcattctaatgggtaattcttcatgatgtaatactttagcttacatcattagtgtaagatcaatttatttggttatcacaccgattaaataaaggaagtttccttctccagcagttgaaatgtttctgcaactcttatataaaaaagagttacaggtctttggcctaagctgtctatcttcttgaaaagtacagaaccagagaatacacttttccagcctaagccatccattttcttgataaatccaaaccacagaatgtgctttccctggacttaacactttggctatcttttctgagaatggaaaatttttcttactaaaacatctgcctcactccccacatcacattctctgccatctgacctgcctttgctatgctctgataactgccagaagtctacagcaatctcattttaagagtgaccctaccactaactgtgaataaagttttctcacctggtttttgccagtcttactctagaacctttccttcccttgacacatatttcttattccataggtagtgggatataaaataggcaaaaatttcttcctcaaggaatttttacccaaaatttcccaaaatttacccaaaaattcctcaaggaaggaattcttcctcaaattcattctcttagtttatcctctctttccattgctgagtaatcatttcttctaccccctaatacctttattcttcttgagtgataccaggagaggaaagcaaaggatgacacagaaaattctgataaaagaaggtgacagcaataaggctaaataaactgttcagctagaacctctcaagctgaaatcagaaattttctcctgatgtattgtataatatcagtgtcctcatttgttattacagcattagctactaattgtctcccattgtctatttacctccttcttccttttagcaatagacccatcctcccttgcagttttaggaagcccagcttgataccgcacttcccaaactcccatatggctaggagtcaccaggtgatgacattttagaaagcagaatgtgagcaaaaatgatgtgcccaacttcctagtcacattcttttaaaaagcaactgtgtgtcctctacttactgttgcctctttccaaagggctaaaatgtggatatacggggtgactgcaaaagaacagcaaaccctgaatgatgatgaaaccagacagaaggaacccgggtcctttgatgacatcatggattcaatttgctctaattccttggattgcctaccagttcagacttttacttcaggaagaaactttccatgtccatttaaccactactttttggtctgtatgaaagatgtaaaccttaaaactggcttttatataaaaagatttattttgggagaaacagagtatgtgggcatagtctaaaaaaggcaatatgatcagatggaagccctaaaagatcaattacactcaaacatgagaagcatttcttagggtgagacagaaagatgactggagaacatatttgattcaacaaactgttactagattcctacttaggccagacactatgtcatatacgtgacaggaactaggtaagtaaattgtgtgtgtgtgtgtagttcccaacttcactgaattttctgtacagtgagagattaaattctagggaattagctaagatataattggtcaataattactgttcaagtgataccatgtgccaggtaatgtgctaggtgctggaaaagatggtctctcttctaccttctaaatatttttcttcctcttgagtgccacttctttggtttaggctctcagaatttatttcagctcacacccttctaactggtttcctttccttcagtttcttctccctccaacccactgtcatctgagtaacataaaaatcctaaaataagaatctgattgatactctgttactctttaaaaaaaaaaaaaaaaaaaaaaaaaactttacaaaatttttcttactgaaacatctgcctttctattgccaataggttaaatttcaaaatgtcctttctagtcttattcttcatcactttattattcaccccagctacacggaactgttcatcatttacccaacataccttcatttgctctcttcttcctttctcagttcttcatctttgagtcagtttggactgcgataacaaatatcataaactgggtaacaaacaacaggaattttatttcctcacagttcttagagtctgagataaaggtaccaacatggccagtttctagtaagagcccttttactggattgtagacagtgccttctcactagttcctctcacataggggatttgggagtccagggggaaagagagagcagagtgagtagggtgtctgcatatttgctgtttcttcttataagagcactaattccatcatgacggctccaataccctcacaatgtcatctaaacctaattatctttatttcttaaaggccccatctccaaatatcctcacattgttggtagggcttcaacatataaattttgggagattgctaggtagtttattctctttgtgagcgaatggagttcactcatgatttggctctctgcttgtctactgttggtgtataggaatgcttgtgatttttgcacatcaattttatatcctgagaatttgctgaagttgcttatcagcttaaggagttttggggctgagaatatggggttttctaaatatacaattatgtcatctgcaaacagagacaattgggatttgaacaatgagaacacatggacacagggggaggggaacatcacataccagggcctatcgaggggtggggggcaagaggagggagagcattaggacaaatacctaatgcatgcagggcttaaaacctagatgacgggttaaaaggtgcagcgaaccaccatggcacatgtatacctatgtaacaaacctgcatgttccgtacatgtatcccagaacttaaagttaaaaaaaaaaggggggagaatatgattccatccatagcagatggcaaactaatccttcaatacccagctcaactgtctcttaagtatcctcattctctgaatgaaatttagttgctctgctatctatgctctgattaacgacattctggattaattatttccattattagatggtaaatacctacagggtagagattatatatattcatctttgtattttctcagaattaagtaggatgtttggcaaacattagccccaatacatatttgctgaatgaaacactggactttcagaagcaatgaaagatatgtgctaaaatctttttttttttttaatgcttttctctacttgcaggtcaggcattataataaactctttctcccccccacctctacaattctagactctgcattcataatttctttcattctttccctccttctcctcacctcttccctccctttccctccctccctccctccttttattagagacagggtctccctctgttgccatgctatagtgcagtggtatgatcctagcacactgtaacctcaaactcctgggctcaagtgatcctcccacctcagcctccctagtagctgggactaaaggtgtgcatcactacacttggctaattgtttaaactttttgtagagatggggtcttgggatgtttcccaggcaggtcttgaactcctggcctgaagtcatcctcccaccttggcctcccaaagtgttgggattatgggcatgagccactgcccttggtccatagtttgtttctttatagcatcattgatctcaagttgtctataaccactaatttctatggagttgaaatgcagattctatcaaccaatgctagattattaatgttgactttataattgcagacacttttacataaagagtaggtcaacatgttttcacaagagtaataagtaacttcagatgcccttgtaagaaatgcagcaataggactcacctattacttttctctactgaatgcatttccacatcaacagtgttaccaatcattattttatgttaccacagcagagaagatttaatcttcttttacataacaatttctttgccttagaggccttgtgatcattcaatattattcctattctaaatctgtcatgtttaaaacctactgcctgtattaaatatctattatctatttacagccaagagaggttaagtaacacagctgtggtcaaaagttagctaatactgaagctctgggattaatctccaaatattctgagtatgaatgcatattcattcagacatgaccatgcatatgtcataaaattttataaaattacagaggcagttgatatgaaaagtgtaaaatatgtgatcaaattaattagatatgttaattatggtacttaagttagagttgtaggtctatcaataaatattcactgaaagtttactaagtttaagtcactatttacaagtaacggaggagggggcacaggaggataaagctaataggtagaaagtataataaatggcagagtaaagggttaaaagagaagtacaaagtacaactgtgatgtcatagaaagaaagaaaacctggcaggcatggctattgtctttacatatcaggactaaagtgagatttaatttgctttgtttaagccttagagctagaatgaggaccaatgggtagaatttacatggcacaggcttcacttggtataagagttatttgaaaatagaatgttgaaaacagaatatttttgtgataatatactataagcttaatctacatgtagtagaggtgtcatggtgagatggtggggagcaggtggtctgtagggaacaatcccacccaagaccagtgagtacctgaataaacactattatatgcttgtagtcatggcttaaatgcaggagcataacacaattgtactgcccatttgcaagatatatttatcagcagtgtatcaaatgtataaaaaagtgatagggagactagaaggacgttattaccatagttcatataagagataagaaaggctactgtggtaaaaatgagccagcagagttaggaaaagatgttctaattacttcaatcaattatatgctaatattatctattactaaagaagataaaaatgggattaagtgtacataatagaattatcatctatcctattatttaccttaatatatttaaattccatattaatatatttactgtaacatgtctaaaactgaatttatcttcctcaaagaacttatcttttcctctttctgtaatgcctatttcaattgttagtatgacaattcatgcagtaactttagttaaaaatctcaatattatcttcaacttcttccccttatgttctttatgactctgatatgtctctagaatctagaatgtcttctctgtcctctctgtcattgttttaactaaggtcatcatctcctgcttaatttcctttaactgttatggcctcctaattgattttcctgtctccattctttcctagcttgagtccgatactcacactgccatcttcctaatgaataaattaaatataattatatcattcccatgtctttttagcagttcctggctgtctgtaagagaaagtaccaactcctcagcaaggtataaatgcctcttcataaatgtgacctcaacttaacctcccaagcctcatccctggctattctttcccaagaaacctatgcaatggccatacaaaaaattccattatcttaatcttttcctatactataagcttattcatttcatatggcacttgtcaaatatcagtgtctgggaaaggtttgagtgaacatttttaatcaattgctatttagtaaataaaccaacaatctttcagtacaatctacagtattctactggtaattgattctctagaattgaaaaaaaaatttccctcagcatctttcccccgtagactattatgatgattaattttgtgtcaacttgagtgggctgcgggatgcccagatagctggtaagacattatttctgagaatgtctgtgagggtgtttccagaaaaggttagcatctgaatcagcacactaaacaaagaagatccactctcactaacatgggcaggtatcatccaatccaatgagtaccagaacagaataaaaaagcagaaggatgaattccctccacccactccttgagttgagacacccatcttctcttgcccttaggcattagagctcctggtctgtgagtcttcagactcagggacttacaccagtgccctactcctgggaatttaggcctttggcatcagactgggagttacaccattggttcccctggttcttaagacttcacacttgggctgaattgtaccaccagcctctgggtctctagcttgaatatggcatactgtggtgcttctcagcccccataatcacacatgccaattcccataataaatctcatctcacacacacacacacacacacacacacacgtactcccagaaataatgtttatcacttatcctggcatccctcaacccactcaagctggcatataaaattaaccataatagtagtctacagggaaaagctattgagggaaaattcttttcaatcactctagagaatcaactagtagtagaatacgaatgtattggtttatttactaattagagattgatgaaaaatgtttgctcacaagcctttcccaggtactgacacttgacaagtgccatatgaaatgaataaacttatagtctagaaaaaataggaaatgattaggacaatgaattttctatatggctgtggcataggtttcttttattatacaaacactcacacacataaacatatatagatgttattggctctgattctctgggaaatcttaatacaactacaaaactttatttgccacttgttcccactttcaaaacacaatttactatttatttccattattaaaaataataactaatcattaaaaacatttgaaaagcaacggaaagagaaaagcaaaaaaacactgacgctttaagacactggagtaggtgtatgtccttgtaatgtttttattacattgagatatcatacacataaacacatcttatatactacatttttatatcctaaatttttcttttctccgaattctaaaataaaataaattttcatattttttctgatgaaaagtgaaaaatgaaagtaattttcctctcattaagtgcatattttcatacaatgtacgatacaaaaaggtattcatttttttcttttttgaagacagggtcttgctctgttgcctggtctggagtgcagtgacacaatcagggtttgctgcagcctcagcctcccaggctcaagcatccttctgcctcaggctcccaagtagctgggactacaggcacatgacaccatgcccagctaatatttttactttttgtagagatggggtcttactatgttgtccaagctagcttcaaactcccaggctcaagcaatcctcctcccttggcctcccaaagcactgggattatagatatgtgccaccatgccaggcctaagaatgtattcttaaaataggtatggtctcatttgtacaactaaaacttattaaaacatatgcagtagtataattttatcataggaagtataatgtagagtataacaacacaggtttcttgcactggaatcccagttcaatatttatgattgctgtgacaagttacctaaactcacaagttacctaaactctctatgcctcaagtttctaatctacaggttgagagtaataatagcacttacctcataaacttattgtgagacctagatgagttaatccataaatggcttacaacaatgtctggtgcatattattaagtgttcaacgcacgacagctcttattatccttctaaaaatctaaagtttaatgaacaaaatcccattaaacaaagcgaaatataaattttgtctattgaaaatatgttgcacagtgagcattacaaaaataattacatatatattttagtatcttctctagcacagaaaaaaagtagaaagaagaaaataagggatcatgagatcctggcaagagtttttctccacagacattctgttggtggaatagaaatatgtgagatggtgaatggaacagatctaaataagcatgggactaacaaagtacaatgtatgaaagattttacttagaaaaaacaattacaaattgactatacaatcaataagactaaccgaagggaaatgcagtaaaacactttcaaagaaaaatactgtggagcccagaagaaaataagccaattgacagaggtagatttcacgagctcataaaaatgaaaaagtaaatgctgctggacaaaaagtggtccttacttttgctctcaatgtttctagtatgctatgtagaacaattattttgcttttactgaaaaataactattgcatttggtataaaacgattcataggaaaaattattttttacttctgaataattaatgtatttcttaagtaatagaggaaactattaattaagaggcattcatgaaggtggatatcttacacctaaacattttagacttgttttccaattttctttctttctttttttttttgagacaaggtcttgctctgtcacccaggctggagtgtagtagtgccatcacagctcactgcagcctctacttactgggctcaagtgatcatcccacatcagcctcccatgtagatggaactaccggcatgtgctaccacacctagataagtttttttgttttttgtagagacagagtcttgctgtgttgttcaggctggtctcaaactcctgggctcaagcaatcctctgctttagcctcccagagtgccgggatttacaggtgtgagccaccatgcccagcccttttcaatattgtttttgaaaattccatcctatactgccaaatataaatatatcccaagaaattaaaatacagaaaattaaattgcaaagaaaatatggttgcagaattcttgcaatttaattttagtaaattctttatcttttttattaacataccttaaaattgctatgcacatattttctgtctcagttatgtactcaactagaaattacctttacttaactacctgtattttattgaaatactgtgcccatcctgcatggactattttgcgtcacttattttatgaatatcactattggatatgctcttttgcaccaatagactcttattcaggtatgacacacagagacacaaaatgctaaattctcctttcctgtgaccatggcagaaactactaatcaatattcttgggcaaagttggttctcaagatgctcaagctctgctgttgtcataaagcattttggttctcttctgatactttttgaagactcatccatttttcattctttcagcaaacatgaccatgataccccatatagaccagatattgtgctacagttgcgaaaacaaagaataagagaggtcctcaagcggctcaacatctcatggtgaaaatgagatgctgagccaccactaacatgctagctgttaagtatgtccacttaaaagagaacacaggagaaacatctcaggcggactctgttggcgtggttggtggtgagggaatgttgaagagtggatagaggtataattaaaggctttctggatggcgtggtggcttatatgagtagtcccagcactttgggtgggattacagcacttgaggtcaagagctggagatgtgcctggccaatatggtgaaaccccgtctctactaaaaatacaaaaattagcagctgagtgtggtagtgtggcgcctgtaatgccagctacacgggaggctgaggcatgagaatcacttgaactcaggaggtggaagtttcagtgggcggagatcgcaccactgcactccagccagggtgatgaagtgagactctgtcaatcaaacaatcaatcaatcaatcaatcaaggcttcccaagggggaggaatctggcatttttgtaggcaaaggaaacagcttataagatgtgagagaacacagccattttagagaagtgtacattgttcagtgttactggactatagttttcaagagatgaagttggggaagtaagcaggtaaattgtgaagatcattccaagtcatgttgtaaagctgggaaagctataagtaaccactgaagaattttaagcagtatttgtgagagcctccaatttagggagtatccaatttataaatatcttcatatagtttaaaaagaaatagttattttatgtggtttcctatggcaccaactagaatgtttctgggatgatccagaaacatgtacaagtgatctgctgctgagatgcagattatatttcttcaaaaaaacctggatcaaaaattttgtcgttttacttttaaaacgaatttgagtcagaatccattatatattattctctggtgtagagcataatggaataactataatacagctcaataaaaatgaaaacaagaggatatcataaaaagacggtttcaaagaacattttgaggccaagtgcagtggctcatgcctgtaatcccagcactttgggaggacaaggagggaggatggcttgaagccaggagtttgagaccagcctgagcaaacattaggagacccccatcttcacaaaaaataaaattagctagatgtggtggcatgtgcctatagttctagctactcgagaagctcacttgactccaggagtttgagactgtagtaggctatgatcagccactgcactccagcctggtgacaatgagatgctgtcttaaaattaaaaaaataataaaaaaagaagttttctttcaaaaagacagaacaagtagttgagtgagtgttatgggttgagctgtgtcccctccaacacaactccatatgttggagtcttaaactccagtacctcaaaatgagattggagataggttatttacagaggtaaacaggttaaaatgaagtcatttggatgttccctaatccaatatgactggtgtctttatagaaaggggaaaatgtggacacagagacagatatgcacacagggagaacaccttgtgaagaccgaggttacactgctgcaattgaaggacctatcagaagctcggagagaggcctggaacagatccttctctatcgccttcagcgggagaatggccctgctgactccatgatctcagacttaaagcctccagtactgtcagacaataaacgtatgttgtttaagccatgcagtttgtgggacagtaattattcacttaacattgtcaacaggttcttggaaactgtgactttaagtaaaatgacacataaggaaagcaatttttttccgataacatcataactaaatgacattatctgagaacctattgtaattatttcacttaaagtcccagtttccaagaacttatccatgatgttaagtgaggacttactatactttgtaatggcagccctaggaaactaatacaagtagggttacaggagaagtaacttctaagaatttacatggcaactaaaagcagtaacttaccctagactggatcccatattgcagcgtaaaaattatataaatattacatgttatatatcactaacaaaagtgatatatatggagagtaaattagacgaaagtattacatcaacataagtttataaaatggataactgtgctgtagttacataagaaaatatccctattcttaggaggtacacactgaaatatttagaggtaaaagaccatgaagtatgtaacttaccttaaggaattcagtaaaaatattgtgtgtatatataattatgtgggtgtgtgagtatatatacatatactacagagagggtgaaaaaagaggagagagaggaggaagggagggagagagaaaactcacataaaaaagagggagggaaaaaggttaacaatagtgaacctgagaaaagtgtataagaattctgtgggcacggcggctcacgcctgtaatcccagcactttcagaggccgagacgggcaaatcataaggtcaggagatcgagatcatcctgactaacacggtgaaatgccatctctactaaaaaaaaaaaaaaaaaaattctgtgtgctatttttttctttgcaagtttttataagtttggaattatttggaaataaaatacaaaaaaagaacttattttagacgagatcaggcactttcagggtggtacagcagtagaccaaaaaaaaaaaagaacttattttaagaacaatgcctaagcatattgctacaaacattttatttttagtatggcataagtatatgaacaaaaaaagtgaaacgataaagtgaatgaataactgattaagaaagaaagaagcggggaagaaaagaaacaaaaactcaaaaattgatttaagctatagaaattctaagtgccacagaaaattttgagatataaatttctcaaaataaaaaccaggtactatagtcacggcatttaatacaataaaaataatacaaactaaatttgcctttgcttaaaaataagaatcagaatatctactttttctttagaaagtagcttaacatttatttagaataactgttagtggagagaaaaaatggcctatttttgtttatttatataatactcacacaactattcattgtttcctagcattgcaatactttgatatttatcctaaagtttctctatgttctaatgataattctaaaatatagaattatctatctctctctatatatataaatataaattctaaaatatagcattatcattaaaaatatagaaaggaatcaaccggaccacaaaaaactaagccgttctggataagcatgtggcaatcctcttcttcctttttctttttttttggaggtgggtgggaaggtcacagtggttaacataatcaaggaaatttgctagtatatacagaagtctttgctaagaaattttcgtttgagatacaccagttaccggcaaatcaaacagacataaataccacagtaagcagtcatttatcgggtaaccctgtgcagagttgcatgaaagcatccagaggcagaacaaaatccacagcagagccgctgcttttcagatagactgccactgcaggtgccatggcccagtgccagaaacacaggcaggggaggggttacaggcagctcctgcacagcaccactgggcagaagttgcctgtaatcagagcactactgaaagcaatggtggtggcaaggtgaacttggtgagcaagcattcctctgtgaattcaatttcttcttgtgaatttcatattgcgagcccattagcctcacttctcttctctagccattatcattagcccctcgcagaaacgatgactaccagctgtaactggcagcacactaccatgataatttacacaaagattaaaaatgaaaaattaaatactgggatttctagccatcttttaactttttttattataaaaagtatctctctctctttcttcttcttcttccccttctcctttcccttctccttccccttcttttttttaacttcaaacctatagtaactttggacaagcactaagttaccataaatgaggttttgtttatttctttttcctgaagtcagtgcaacaaggtatttcaaaaccttaaagaaagaaattatgaaattaagaaatagatgacaaaatatacacctggctgggcacggtggctcacacctgtaatcccagtactttgggaggctgaggagggcagatcatttgaggtcaggagtttaaggagtttgagaccagcctgaccaacatggtgaaacccggtctctactaaaaatacaaaaaattagccaggtgtggtggtgagtgcctgtagtcccagctacttgggaggctaaggtaggagaattgcttgaacctggaaggcagaggttgcagtgagctgagattgtgccactgtactccagcctgggcgacagagcgagattctgtctcaaaaaaaaacaccacccaaaccagaagtattttgaataaagtgtcaaatacttacaaggtgtaattactattgatatcatgagcagccactgtgccaaattcatgcaccatagaagattctgaactccaaagggcctggcatgggtctttgcaatttagttatggacatgactgaatctcacatgaagaaatgtttaataatcaataaagagaaataattgaaaaactgctctaaaatgaattagatcagccatctgcacaataccatctcaagtaataattgggaaagaatatataggggtgtttctgaaatgtttcaaagaagatgagagttctgagaagagtatttgtaagtttttagattattttgctttttgagagcatagtgataagaagggtaacgatgcacgctttagggtatcatttggctaaaaaaggagtagggtaggctcatactgcaatgataagaagaacatgtggcaggcactgtggtaagaaaagcatgaggagtaactcaagctagaagcctaactattacaggttcctgtgtcaggaagagggagaaatctggcatttccccccacactttcagctatatcactgaggctgaagtctatagggaagagtaactactattagacaatccttttcaattatatagatgagatacccacggggaagaattttccaaaatttaaaaatcattaatatattttaatgaaatactaacaatgtggtagaaaatcatagaagttacttaccccagaataaacacagaatttgaatatttttctaccatggatgtagcatatattagaaatagtatcattttattttatttggcttgtatctagcacaataacatgtcactaaacaaaatgcggtttactctcatttgtccagagttcagaatttaggtgttcagagaatctagaacacagtcaaactcaaagcaactgaaggccaagaggaaaacaagcaaaaagctcatgaactttaacggtgggaggcattgggtcattcctcaagcttttaacccagccatatatgcattaaataacataatcaatcacaacaagatggaaaccctaacagagaagtgacatctgacatagaagagaactttgaatgctgacagaaaagctaaaagaaagcaaaggaatgtgggtcattttaagtgaggaacaaaaagctctatgcatctcagaaacttcaaggcatcatggaaaatgtctggaatattcaattgttagtaatacagaaaaggctatttaagatttaatttcagaaagaattctccatttaagaggcaaagaaatgtgtaatccatttcataaagagatttctcttcaagggaaatggtgaaaaccactggtatttgaaagtgtaaaccccaattctataaaacttttactgtatgatgttttaattccattcctagatgatgctgagtacctgatgcactcttctgatgccattttgaaatgtttctattaaggtaaagtagtgaatacaattaatagatattttttctcctcttaacttctttaggagataaaagatcatataacacaacatttataacactgcatagtaggcttatatataaatgtaatatatatatataaataatagcacaaattaggggtaaggaatggagctgagttggagcaaagctgctatattttactggaattaagttggtaataacctgaagtaaattgtcataatttaaaatgcagactgggtgcagtcgctcatgcctatgagcccagcactttgagaagccaagataagaggattgcttgaggtcaggagttcaagaccagcttgggcaacatagtgagacctcatctctatgaaaaataaaaaacttagctgggtgtagtggcacacgtttgtactcccagctactcaggaggctgtggtgagaagatcgtttgagcccaggaggttgaggctgcagtgagccgtgattgtaccactacactctagcctgggtgacagagtgagattctgtctcaaaaaataaaatgtatattgtagtctctataaatacgactaagaaaagaactaaaacaaatacatagtaaaaaaaatttaatgaaaatagtagaccagaaatattatttaatacaacaaagatgataaaggaggaacagaaaaacaaaaagacccaagactaaagaaaataattaataaaatggtagacatgaatccaactattatagaactctctactagatgagatttctttacatgtgctgatctatttctggattatgctattggatgctatctggattgtgctattattatgctatcaataataacattaaatgtgaataaacacttcaaatggcagagattgtcagtctagataagtaacatgatccaactatatgctatctacaaaagacattttgaaagtgtccaaaatccaaaaaaatggattgaaaataaaataatggaaaaaggtataccatgcaaacagttaccataagagaactgacgtggctttaacagtatcaggcaaaacagactcaaaaattactaaaaacaaacagagacaatttatgactaaaaagttggttaatttatcaggaagacataacaattataaacatatatgcactgtgataggctgaaaaatgtacccctcacccccaggaagatatcaggtcctactccctggaatctgtaaaatgctacattacatgggaaaaggttctttgcaatgtcattaaattgaggaattttttttttggagacggaatctcactctgtagcccaggctggagtgcagtggcataattgcagctcactgcaacctccacctcccaggttcaagcgatcctcctgcctcagcctcccgagtagctggaactacaggcacacacctccatgcctggctaattttttgtatttttagtagagatggggttttgccatgttcgccaggctggtcttgacctcctgacctcaggtgatccgccctgccttagcctcccaaagtgctgggattacaggcatgagccatggtgcttggcctcagttgaggattttgagatgggaagattatcctgattatgagggaggaccctaaatgcaatcacatgtatctttagaaaatggagacagggacagatttggctatagacagaaaagaaggcaatgtgaagacacaggcagacatcctctggacgaagtgtgatactgatttcagatttctggactctagaactgtgaaagaataaatttctgctgtttaagccaccaagtgtttgcagtaatttgctatagcagctataggaaactaacatatacatttaataacagagcccaaatatacatgaagcaaaaactgatagaattgaaaacagcatttggagacttcaatatcccactagcaaaacaaaaacaaacaaaaacaaaaacaaaaaaaacaactagacagaaagtcagcaaagatacagaatagttaaacacaaaaaactaagtcaatcaactcacatccacagaacactcaacaatagcagaatatccattcttctaaagataacatgaagaattctcctatatagacccaatgctaggttgaaaacaagtctcaatacattttaagcaactgaaatcatacacagtatgctctccaatcacaatgaaattaaaaatagaaaatacaggagaaaatttggaaaatacacatttggaaaatacagaaggggattttggaaaatatttggaaaccaagcaatgcacttctaaacaatccataagccaagaaagaaaccacaagaatattaagagaattgcataagctgaatgaaaacaaggaaacaaaatatcaaaatttatgagatacagcaaaaaccacacataacgagaaaattgtaattggaaaacctgatattggaagagaagaactcaaataaaaaaactaggtttccaatttaataatctagttagagtaaactaaacccaaagcaagcaaaaggaaagaaagaatgaatattagagcgaaaactcaacgaaagagaacacagagacaccatagaggaaaccagtgaaacaaaaagttggctctttgaaaagacaacaaaattgacaaacccttttagcaagactgagccagaaaaaaagataacaccaattaccaaaaatcagtataaatgaggtaatatcattactaaccttagagaaattaaaatgataataagtcatactatgaacaactttataaaaataaattagttaaatggacaaattccaagaaagaaataaattactgacatagattcaagaaaaaatttaaaaaaaatcttgatagacctataaaaactaaaaaaactgatttggtaatttaaaatcttctcacaaagaaaaggccatgcctaaatagcgtcagtggtgaattccaccaaacatttaaagaagaaataatatgtagcattcacaaagtccttcaaaaatatagaggaagaaggaacactgccatgtctcattctatgagactagtattaccctgataataaagtcagatgaggatatcacaaaaaaactgcaaactaatattcctcataaatatagattcaaaaatcctcaaaagtagtaattcctcaagaaaatactaacaaaacaaaaatccaggacatatcaaaagaacttaaaacatataagtgtaatatatttgtgaatgcaaggctggtttaacaaccaaaaatcaatttatataatatatcatatttcacttttttgtttcttgcttgaaaatctttccctattccaatatcacatagaaattctcctgtattatcttgttaaagtttatagttttacctttatatataaagctttaatatactttcattttgtttgtggcataaaataaggttccaattaaaatttttttccccatatatctgctataggttgaattgtggccactccccccaaatttttatgttaaagtctcaacctaacagcacctcagaaggtggccttatatgaaaattgggtcattacagaagtctttatttaggataggccatactggagtagggtgagtccttaatctaatatgaatggtgtccttattaaaaggaaaaatttggacagacagacatgcatagagggaggatgatgtgaagagacacaaggagaagacagccacatataagccaatcagagggctagaacaggtccttcccgtacagcatttaggagaaatcaaccctgctaaactttgatttcagacctctggactccaaacctgtgagacaataaatttctgttgtttctacccagataatcatactttgttacagaagccctaggaaactaataaaataactatttatctcagaatcctaaattgaaaagtccttcctttccccacagttctgcaatactagctctataatggatgaggtttctttacatatcctggcctatttctgggttctctgttcacttttcctgtactacttctccttccctaattactatagctttataataatttttgatatctagtaaagcaagtccctctgaaatctgctcttgttccccaaaaggattttggccataatggtcctttgctctttaaaatcagtttatcatcttccaacaaaacaaagtaaacctactgaatggtttttatatttttacattgactttataaataaatgtggggagaattaacaatctatcaatatggcaaatcttttttcctcttatttaggtgtcctcgttttttaactaaaaatttcacagtaaattacatatcacggctaaaagcaaaccaaacaatagtaattttagactcttcatacctatctccctacattcccagggaatttaaatccaaccactgcactgggagtaaagaggatgaagacatgagagggagataccctcagctaacaataattatttccaactgcagccaccacggctgtttacattcttggccacatcattatcaatatgggaaatgaaaaggaaacaataacaacaaaaaaaacaatttgaaaaaagcttctggcatttcaattccaaaaatttttttttttaaatgttgtctggtcagtggtcttaagaatgtcatttccccactcttgttcagtggggggcatgacagtctgtctctatgctgtcatcacttgagaagtgtaaattttccattcagagaaaaaaattatacaagattgacctaattcattcagaggtgtaagatctataaaggtttatgttgaatagatttaaattttagcaatgatagaaacaagtttagattttatttctttatcaaccttgttttttcctgtcaggcaatactatgaaaggacagcatctcttttaacttgtccacatattctctgatgataatggaaagcagatagtatattcattttatttttctttaccttgttaagtgagtactatttgtgtcaccattatgaaatagtagaggagacaaaagctatagaacatacacaaaagtaaatgtgattttaactggtaaccttaggacaattcaacaagagaacgcttcctttgctatattaatgccacctccaggccttgagaagctttctgtttcaacaaggtatcaaagagaaggtaatctccaaatagggatattgtctcttattcatcgaatctaatagtgctggtccataagcaagcacccaataaatacatgttaaatgaatgaactattataatttgaatcaattatgtatattatgtatcttttggctaaaacaaaatgctctatttttaaaggtcaacttttagtgattctccccagagtatggttttctttgtctcttattcaacatgaaacttgaaggttataagaggcagtataatatgtaggtccaaacattgacattatatcataagagacagatgatgggcattccgaactcataaatttttctattatttgaaagtatgaaagcctttttctcatttatatttctgatgctgtatctgaaataaatttttttcctagttcaggtaatagtagataacagggaccaatctcagggatataattaagactgctttggttttaccctgattccaactgttcagaacaaaatataatttacttctctgaaaaactaatgaaatttaggtgagttttccttctaaaatatgtaggatattatcttctgttcataagcccatccacttagccagttttccaatcctacatttagatcttcattacttacagaaaactgaggataagagtcgttgggtgagacagtagttacagtcctctaacacaaacagggaatgtagcattactggttcactaccaaaatcatgctcctaaaaataccctatcctcttgaattaacaaccaaatacttaaaaaagacatgctgggtatcttaaaatgagtatgtcagttaattaattctctgatcccctgctaccaaccgagtattgtataatctgttattattcactgtcctatagatcatctgttcttggtgctggtttgttccaggaagagggacagctgcaacactatatccctgttcaacctgaggaccatctgactttaattgtaacacacagcttgatgtggctctggctatgagaagccgaagtatcgtctgtaataatctggaaaagcagaaacctgccaacagagggctgaaaacagggattgtgctgtctggctgcctgacgggctgcaggaaatatgattaatgagtaaggtataatgatatcaggaacccgattagcaccacaaaaaggtcacagatcaaagtagtatgcatttcatgagctgcaatcattgcataaaatctgtggaattgaagtggtaaaccaaaaagaggagggggatgaaactcttatgtgacaatatgctaaccaatacataagatacaatactaacaatttagtcacttgtagaaagttaaaaagaaattacaaaatgaatcaatatagactatattgtaaggaaactttgttcatcagaggtgtaaaataaatattttgaatgaatgaatgaggtattaaattctttcataaaggcacatatatgtaaaatcaagtatctttcctaattatgaattaaaatgaccagatatatactcaactctaaactatgtttgcatttgaattgcagtgattttatatacagttctgtttaggaatgtaagctaattcagagtctaaacaatgaagacatctataaaactcaagcagtaggaatcactgggaaaaatattaagtaaactcaataataatgttataacaaatgcacagttaatactgcaaaatattatttggtatataactttacaatcatgcccaagtttagagcgtgggtagccaaaatccaaatctacttgtaaagcaattacgtaaaccacaatcttcttttccttagtgcccttgtaaacctgtcccaaatagacctggctcttctgaggtgaaggcagtgagggtagagatgggaggtactgtcaagagagcggcttgccttaacttatgtaattaaattttttaattgtcaaaatgttggtgaaaaacttaatatataacttattcaaatgtttctgccttttagagctcctttaaagtgaagtaaacatactaacaaacttctttatattattaataatactaactatggtaatgattaacagaaaaccgattcccttgagacttaaaatttcaagtcatatttgagaaaaagtgtgtcaataaaaaaatgatcagaacatgattttttcttaaaagtatattcaccaataatgaggatattttgtatcttttatatattgtataaatatttaatatctaatatttagttaaaacattttttaaatcgtgattcaaaagacaccattaaaaaataaaaaaaggctagttaaaaaatattttcaaaatatatgttggataaatgacttttatggagaatacacaaagatctcttacaattcactaataaaaagacaacccaatttaaaaacaggcaaaatatttgaatggatacttcaccaaagaaaatatatatatatatgagtagcaaataagtcggtgaaaagatggttaacattttcatcattaggataatgcaaattaaaataacaatgacctacctactagaatggctaaaataaataagactgacaataccaagtcttgttaaggatagggaaaaactgaaacttcatacattgtaggaatacaaaatggtaaacatttttattatatgacccaggaattcccagaaatctacccaagagaaataaaaacagatgtccacaccaagacttatacgcaaatatttataatagcccaaactagaaaaaaaagtccattaactagtaaagagattttaaaatgtgatatatctataaaatggaatactatacagcaatacaaagaaattaactactgatatatgcacaacatggatgaatctcaaaaaacatcatgctaactgaaagaagacaggcataaaaagactacatattgtatgattccattaatataaaatttctagaaaagcaaaacagagacagaatcagtgattgcctggagccggcagtggaagcagaggctgactataaagaggcccaaggaaactttttgtactcgtgagtgttctaaagctggaatgtagtggcagttacataactgtatacacttactaaactccttgaattgcatactttaagaagttgaattttattatatatagattgtacctcaatgaatttgttttaaaagaaaaatcactgaaagaaaaaagttgtagtatgaatgtaacttctattcacttttgtgtatccctggggaaaaaaaaccacacacgaccatagacacctgccgcatttaaaggtttgacatttccttcagtatctttcagagcaagtttagtcttcatctctcaatcacagaaactttgtgagaatctttaaaaattcttggggtaaaagtaaaatgcaacatgttccataagactgtgatagaataatattatttactattttctgagtgcctactataagccagataatattctaggcatttacatacataattacaattgtttactcataatttcaaaattacaaatgaaaaaaccaaagctcagaaaggttaaactgctaaggtcccacaatcagcaatgtgattgataaaggattggaaaatctggtcagattccaaagcttacatattctttccactcccctgcattgtttccagtatatatagaatgcaaaatttcaataataatgagactgtaataggatctggaagataggattaattgttggtatgaaaagaaaggaatgccacattaaaaaaatgcaataattttccttttttacatgtgaagtaaaaacaatgcaactgagatttcacttttaatgtagagtgtggtaaacattctacttttattttttaaatttattttattttttattttttcgagacagagtttcactgtgtcacccaggctggagtacaatggcatgatatcagctcactgcaacctctgcctcccaggttcaagcgattctcctgcctcagcctcccaagtagctgggattacaggcgcctgccaccacatccggctaatttttgtatttttaatagcagtggggtttcaccatgttgggcaggctggtctcgaactcctgacctcaggtaatccacccaccttggcctcccaaagtgctgggattacaggtgcgagccaccgcacccggccaagattctacttttaaatactaagaataaagctccctgattccaaacttctgtgaaacttaaaaggcaaaaaggaaaagtcatattagtgtctcgaaaataatactgaacccagataatgaaggacactaaagaatccactaaagaggatactaaagagttgtttgtaagcacaaattcaatgtgcttttaagttttaacattttcatattctcaatattacacgaagatttccttcaaatgatagatacaggacataatttgaaaatcttgtttctattatgaaaatgtgcaatggccttctaacctggaacacaaaattatgttcctttcctggaaagagaagctcatatttggaaaaacttacaatcccaatttcacttctaactttcgcttaaaattttgaatcatcatgtatatatgaatgtaacttaacttctgcataaaagaaactattactttatatatcaattcaataacatttcataaagtatatacaaggattcttgagctattatgtcactttcagttagtcctatcacctacagctttgtccagaagagcaagggttaatgattatacaccaacacatgaaagatgctttgagcaaaagctcatgacagacagagtagatgattattatcttaccaatctgtttatgtgaacaaattcttctgaggttttggcccaaggaggaagttcgacatcagacactactgtcccatcatccatcactccaagattataattattgaagttgacaaacatctcagggagataataaaattcagggatcaactcctatataaaaataaaagacaatgtgatattataaactgtaggatactgactagatattcaaaaaaaggacctgatcattttctattgttcagaagaacaaaataaacacagggaatttttttttctttgcatatcatagccctgtcacagtttctcataagatagacagatcctatctaacccaacttaaataagatcttactggtataaataactttcataggctttccttcatgacatgtctcataacctcaaaactcttaaatacaaatattttagtaataactgaggtttgacaagatataaacataaattaccatgctataacaataatgacaacctaactagattttttatgaggtatattgaatttttgccagaaaaacccaaaatctttctaagcattaaaatgccaatgtcttggtctcttcatcaaccaggaagataatttattacagtttagccatggtttctcagtaccttttcctcacatttcaaaacggtcaagtttaaagataccaactctgatagaagatcaaaatttaaaattagtctagaaaatgacttgcatgagaaactgagtaaattcaatatgtaactttaataatgacatttaataagcagaaaaatgcagctgcttagccttttgtgtgtaataaaccccatatataactatttcagaggctctgtagatcagacttgaaatccagtcttgacatgggtcagtggttcagtggtctttcagatatcccctcagggccagcaatggcaggcccggctttccaaacagttgagtaaaatagggaggtcatcagattttggacaaggtcagtatgaacttgccagagcagagaaaaaaaatccagcaggaattaagctattatcacctccatgatccatgtgaaatgttgcctgactttgaattgtacatcctttgtttacaatcacattaattaactaagcagggtagaaacgagcttgttcttccaaatggctgacaaccacctgaccattagacttaaaaagcattttaactgaacaattaaaaaaaaaaaaagaccttatttaaagcttagctataaataaaattagattataatcacacaaaaattttaagattctcatcttcaaaaacaatgtatataattctaattgacaaaagaggaaaacacaggtgtgtgttattttatgaagcaaaaagccatatccaatttgtctgagctaacacttattgcatggtatgagtcatactctcataccataaataaataaactcttaataaaccttattacatttaatctcacaaccactttacaaggtaaagtatcaatcatttctacttaaaaaatgaactaaggctcaaaaaagtgctttgtccaacgttaccagttggacaaaatatggaagttggaccaggacttgtttaactgtaaagcctgtgtcctcagtcatcaaataagcctgggttctacctacacagtatatgcagtgctaaacattttaagtataagtttttaacttatatacaaagtgatttttaaaaaaggaaaagaaactctaaacttttagcattttcatgatgagaaaacaactggctatcctgaatacatatatctttcatatatatatatttatctctctctatacagcaattgttatataaataattgaaaaagaatttttgtaatgtgatttatcccaataaatcactatataattttctagtattaatttgcccaagtgtgtattcaattaatttccagctttgacaaattttaccaaaatatgttattttcacttcataatacttgtgctactgaagatgaatgttactattcccaggccttgtttcacaataaagagggaggaacatgctttccttgttcattgacaatcaaaagcagcatttgcttaattaaatactaattattctcatttcagtaatacccgctgcccacttccacccccaattcacactctatcatgattagaagatagtgtccttcttttgctggttatacctaccatgctcttgttttataattctcctagattcaaagcaataattataatggatgaattttaagtgctagttttcccctgagttttaaaatttgagagatgcatcatttccattgtaaattagagatgcataataaaatatacctaaatgcatagtaaaaatatacctaaaaagtactcttaccaacaccaatttgaggaagcagaatggaacaaatgacatttcatagcaattgttacaaaaatgaagttttcaatccttctaatatatagtgtcaaaatattatgattttgtatatttgtctgtatcttctacatctgttatttcattcaggttactcaacaaattgacaaaaaatttatttgctcaaaacaaatattctccacaagtttttttggttttttgttttttttttttttggttaagagacagggtcccactctgtcacccaggttggagtacagtagtggcacaatcatagttcaccgtaacctcaaactttaatcgatctttccaccttagcctcccaagtggctaggactataggaatacactaccatgcctggctaattttttaattttttgcagtgacagggtctggctatgttgcccaggctagtctcaaactcttggcttcaagcaatcctccccaaaatatattttattcctggcccaatttatttttaaatacacatttattatgaattattatgttactttaatattgacaccttaacctaaatataaattcaattagttaaactagaaattaaatggagcaaaaccacccataaaacaaacaagaatttttaaataagtgatatgaagaaagcaatttcaaacttttaagtctttcagctacataatatctatcatgctgggaagaaggtaataaccatcagtttccatttaattactatggattttgtgatttcctaaggaaacattttatgtaaattttgtacaatgggcattgtaaacatatttcaaaattaaaaatttaaacagtaaaaattaaaaattagctttcaacatttcacttgaaatttatcaagatatgtatttgtgttttactctattttttcacctctcactcccttcacctttaattttaagagagcagacaggcatttcctttctcaagaacatttgcagggtccagagcagaggcctcttgaaggcatctttcttttctgtcttgtgtgaatctctaagcaaacagagagtatatgaggtatctaggtgaaggaggagtcaaatgttagtatttttaaagagagagaagccaaacaggcataaattttttccaagagtagggaagcaagttctcaaaatctacagtcagcattttttttttccccagcctgggggaaaggagaagggattaagaggttaggcaggaacccagaggatggggaatggtgagcgggtcactatatgcccatacagtgcctctatgtgaaatagaagaaaggtaacactgctaggctaatgcagtcctaagagaattcagtttggtaaatggagtaagtacaggctggattttagcttccgttctttctctcaatcaagtgccctttcatgaagaacaatctgcctactgtacatagtggccccatgcatggtgcacatagggaagctagtcccttggcaccatggtttttggcatcagcaaatattttctaacagtaacttggtataatcatcagagctgcctgccttcgaaagaccatatgtatcttagacaataaagatatgactaatgaagaaaacgatggactaaagatgtgaaggctagttttctaggtatcacacaagcctggactctcattcaagccttgagaaaagaaggtccctgccctaccaatctaataactatgaaggaatttttcaacagcctaatatgaagaagggctaagttcaaattaggatatttcttgtacacttgagttggtggttataattttatacctatgtcaataatggtaaaaagttagcaatatattcactgataatatcttttttttttttttttttttttgagatgaagtcttactatgtcacccaggctggagtgcagtggcgcgatcttggctcactgcaacctctgcctcctgagttcaagcgattctcatgcctcagcttccttagtagctgagattataggcgcctgtaaccataccaggttaatttttgtatttttagtagagacggggtttcagcatgttggccaggctagtctcaaactcctgacctcaggtgatctgcctgcctcggcctcccaaagtgctgggattacaggaatgagccaccaagcccagccatgataatatatgtctagcccaggcaccgtggctaaggcctgtaatcccagcactttgggaggccgaggcagaaggatggcttgtttccaggagttcaagaccagcctgagcaacatggcaagacccgtctctacaaaaaaattaaaaaatttagccaggtatggtggcatgcacctgtgcctgtagtcccagctattcgagagattgatgtgggaagactgtgagcccaggaggctgcagtgagctgtgttcacactactgcactccagcctgggtgacagagtgagaccctgtctcaaaaaaaatacatatatattatacatatatggtatatatataaagtatatatataatacacattatagtataaagtatatataatgcacattatagtataaagtatatataatacacattatagtataaagtatatataatacacattatagtatatataaagtatatataatacacattatagtatatataaagtatatataatacatatataatatataaagtatatataatacacattataatatatataaagtatatataatacacattataatatatataaagtatatataatacacattataatatatataaagtatatataatacacattataatatatataaagtatatataatacacattataatatatataaagtatatataatacacattataatatatataaagtatatataatacacattataatatatataaagtatatataatacacattataatatatataaagtatatataatacacattataatatatataaagtatatataatacacattataatatatataaagtatatataatacacattataatatatataaagtatatataatacacattataatatatataaagtatatataatacacattataatatatataaagtatatataatacacattataatatatataaagtatatataatacacattataatatatataaagtatatataatatacattataatatatataaagtatatataatatacattataatatatataaagtatatataatatacattataatatatataaagtatatataatatacattataatatatataaagtatatataatatacattataatatatataaagtatatataatatacattataatatatataaagtatatataatatacattatattatatataaagtatatataatacatagataatatataaaacatatataatatataaagtatatattatacacatatataatataaatatatacatatatcatacatattttatatatataatataaatatatacttatacatatattatatatataaagtataacatataaatatatgtcattttatgtatatatttatatatacatatatacacatacacaaaatgcaggaagaattcagtatggacagaaatacaaatagaatgtaaatgttatttcttattaaaataataaaactcataagaacacctcttaattatttgatttaaaccttaggtagaaatgaagggtgatgtagcacatcattatcacaaaaaagaaaccacatttatttagttcttattctttttttgtttgtttaacagagagcttcagtttcacgtcactgtcctagcttcatctacctgttgccaacaacttgaaggagtttctccatagcccttgattcctgaattgttcaacatatcaacagcaatagtcacaaatacattgacttaaggagtaaacaagcagcttttctctacagaccactgagcaccccaggaaggtgcagctctctgctccaccccagcgtcttggtgtctgtgtccagcaggaaggacctggcaggaggctgaatccaagcactgctttcaggccactctattctcatccctggatcctccagggaaataagggggaaaaaaaatgacttttcctgctttcaaaatggagggccttaaaatcaaccaaagttccagaacaaaaacaaaacacaggagctggctgggtgcactggctcacacctgtggtcccaacattttgggaggccaaggtgggaggactgattgagtgcaggagttcaagaccagcttggccaacatggcaagaccccatctctacaaaaaaagtaaacaaaaatcagtcgggcatcatggcatatgtctgtagtcccagctactctggagggtgaggtgaggactgcttgagcctgggagggcaaggctgcagtgagccgagttcatgccactggcaccctagcctaggaaacagagttagaccttgtctcaaaacaaaaacccaaaaaaccccccatcatctgcaaagccatgttgggagcacaactgtttcccataggctttctttttccttgccccattgacttccagaaggttttccccttacccatcattgtgacttttctcatctttcacaatggtgcaattcaataggaagaattaacaactagaaaaggaagaacaacaacaacaaaaaatctaaccctatgaaaactctgccttcaacataactccagggagatgaacattataatactggcactcctgacccacactatcctctgcaccccgtccctgaccacatcctcctctctggacacttagacatcaggttccccaagggacaaggttccatgaagagcaccctgagttccttagaagaactggcactgctccggctcctctaacaactgagactggcactgtgggcaccaccaggtgagcctctggaacccacctgagggcccaaagggcttcttcatgacctggtggccagctgggcactgttctttctggtagacctgcatgtgctgcggtttgccctggaacttgccctgcagccaggctgtactgaactccaccacgtgatccaccagggcctcctaacatggaggcactcaggactgaaccaagagaaaggggatggatgccagctctgtacaagacttcattcttaatgacgttccctagccctgagaagtatttctggtccaatggtgtataagtgacaggctgagcctggcctagagcttccaaggcttgtcctcaatggaacttctcagacaggatgtcacaggtgggtgtgacctctggggaagagctccaaggcatctgacaattataaagtgccaggaagctaccaccaccaaagtacaggaccaacctcggggcagggtccctccggtcccccttcttgttggctttcttggctctggagaagtcgttcacccaaacgctgccaagcaaacaagagctgacacgcagccgcctcccagcatctcctgtaggggtgtctcccttcaaacattcctaatcatcctctccctgggggacgagctctgcggactgtgaggaggcgtcaagggtcttctgcccacttgctcccgggcctgctttgagtccacagtcccttccttctgcgcttctttttgtggaggctctggcggtgagctgttgccagcgggccccatttcttcatctggatcaaatctaaggaataatttctttccatggacctgggtgtcctggagccacagagactggaggctggtgggctatacttcttactgttgctccctgtctttaccacctgcttgcccacaaaaggagagaccgaatggtgaaatgtcctcaccaacagcccttctggcatcccagctccgggtgggcagccccttggcccgacccagcaccactgcacgccccgcacagcagctccagcaccaggcagagatttctcagcgccacggcacacgtgggctccgtccccttaggggacgcccctgtaggttagttcttactctttagagagaactgttttagggtctgggatacataaaatgagtcccccccaccgcccgagaatacagatctaaatcagtaatagagaaagaatatatttttaggagaaaatacgttgtgaaaacaactagcactccagaagttcaaataagaaaattatgactaaaagttggggtggccagagaaagctttagggaaaagattgtaatacattgtatttcgctaacacagaactcatcaatctgtattataactgcttgtttgtttctatctccctctaaatggaaggatccatgaaattgaggactttacatgtgaatttaaagtatgacaagcatttctaagaaactaatagtgaggagagagattattaagattttacatatagtatgaagaacaacatcaaattagcacaattaaataagagagcgagcatatatacagcaaatcctcacctactgtcatcgatagggtcttgaaaattgcaactttatgtaaaatggcatataacaaaaccaattttaccacaggctaattgatataaatgagttaagttcccacggcatattttggttgccacaaaaacatcaccaaacttctaaaaagagacccaaaacacttctactattaaatattgaaataaatgtgagctatatgtacatctaagaaagattaacaaaaataagataattatttacccatttattccacttcagggttgcaggtggcctaacacctactgcgccaactcagggcacaagtgaggaaaccatggtgccttggacaggacaccaggtgccatcccatagcagggagcacgtgcgcgcgtgcacacacgcacacacacacacacacacagagtcagatgggtaccaggtagacacaccagttcaccttatgtgcacatctttgggatgtgggaagaaaccagagtacctggaaaaagcccacacagacatgggaagaacatgcaaacaccacacagaaagtggccccggccatgaattgatgttttttttctcaccagcgatataacaaaacattgaatgaaatgacgttatttgaggacatgctgtacttaaactatattgcagtctcatcacaagaaaatctgcatgaataagtcggtgatgagagtgcaatactctcttaatacgaaataaacatgctgaactcaactgatatataccaatatgtaacaaaataaataagcataatacagccaaaatcttactgtggatgacaatggcatttaagttatacagtagaattccattttaatactaaaagcatctttctaagaaccatatcttgatacaataccaaatattacagttcaaaattatctcttttgacagatgaaatgtagtaacagagtcaaagattatgcctttctaatacttttaatgcacatttacaaagtgaagtatgttttatattcatcagaacagaacagtcagctctggataaaaaacacatgttcagcaattctttaaaacatcagtggaaaatgataagtaaacaacactgacagaagacagatacatttacaattcacgttttcttctggcttgctcaaaataattttaatctctatcacttaattaggtagatgggtcttagaggcaggtaacatggccaacatttagtgtatcatctcctaagataaaaatttgaaaggttcaaccagaggttacaccacagttcaggataagctcattgctttgatcacaaatcccaaggctttcatggcataatgacaaggattggttgtgaccacacatatgctttagttttctttattaaggtataatttccactgatatgaacaacctttgcagccaggctgtatgattctccttttaatagtcaccaattctatgcactgaactaaacccaccacttcaatatattggggcaaacataccaactactaatctatcaaccaaaaagaaacaagataatcaaaatagaaataaaaatgaagaagctcctttttagttaaaattaaatatttatttcatttttcctaaatatgaaatattgacaactcaaatagaagcatgataaattagaagttaactaatttaaggtgcactgcttagggacactgatggtaaaaaaatgtgaaagcaaaattttagcttttcaccactgaaaaaatgatttaaaaaattgaaaataagctttcttaattaacaaaaaagagctgattaacaatatattataaaaatataatgtgcatgttttgatacattttaattttcaagatttattttgttagcccataataaaacttttaaaaaattcactagagatcaagaacattgaattgcatttataatagttattttaaatcaactgcatatctgaaagctttcaagttgatatttaaatttagtttgtcctaatttggtagataaaatgctgttttttcctacagtaaaagaaaaacaatcattttcaaaattggaaaagaaaaaataatctataatccttccagaccaaccccataaatattatgtggtttttagatattataaaactgttatttcaaatgcattacaataaagaaaaatcatggattacaaatcaatagataaatgataatctatttcaatctgatatagtagaaaaaataattgggtttaagtcttgtctactcaacttactgtcacatgtactcaaattaatttaatttctgtgacccttactcacctcaattgccatttcaaaatcacagggtttgctgtgaggctcatatgggataatgcggaattctatatatacataagatattattatcattagtaggattcatgataaaaatcccaaattacagactcaacttgcctaaatcctaaagccaataggtcattcactgaattatgcccatttataaaagcatttaacataactctaagaatacttaacaaaacttactttcaaaaatatatatgcccacaaaaatatttgagacttaatacttcctgccaaataactatgacattcaaaacaaatatattattttttttattagcaatgacagtagggtttaacatgcttcatattatgataaatatccccaataatttatggttctttcttgctttcaacacatttttcacttccatgtttgaaatggacatctccattgggccttttgctgttctagacccttatctccaaataaattataatttggaaagaaataatgggcaataataatgcaaacaaaaagtgagctgtaactgccgtaagagaagatgcaaataaaatttctggaataagtggtagacatatatttagtatgggagaagaaccacttatctcagtatctaagaacgcattaatgaacagtctacattttctagttgaacaaaaaatatgataagatcaccagtcaaaaaacaaatcacacttgacatatgcatgcatttttataattctggaagacatgaatattttccaaatgccttaataggtttttaattttcctgtatagtatgtaaatagcatgagaagaaaaatattcagggtttcaagtaatttttatcaatgagcaaaatgtagttcattgtagacacgagtacaaacttcaatacttaattagcacaaagtttcatcatttaacctactgatacttgaagaaaagggctaaagagatgtggctaaattaacaaatcgcaagttatctataagttacgtataaaaagcaaggataaacagacatatttgagaaagcttgagctcactgatgaaaaagaagagaggctggcaaaaaacagaaggaaggagggaagataggaaggagaaaggaatgagcacttaagttgaaaatgtgcaaatgcatgaataaggataagattttaattttactttctttcagcattttttaaaactctaaattattaaaatggtgtctgagaaccggatgcagattttttttactaagaaaataaaattactaaatcatcgaagtttaagttttttaaaaaataaatacattaagaaatacattgccatcaattatgttctattaactgtagctaagcattttcttataaacgggcctaatgttgatgatatcagcatccatggaatgtattaacatggtagaagatgtgctgctagggaaagaagaaacctaatttatcttcagattgcagacctctgggatttctgaggtagtaaagggaagtcaaaggtctcatgttttacaaatctcacaagccacaaaactattctatgatcacctctactgtatattattatttaacatgcatatgtaatttaaaactttttaagggttaaatattaaattatatatgagttcatataatattactgcatagtcatttatttttaaaataatatttagtatctcttaggacttaattgcattctatttacttaactgtaaatatagaatatactttactgaccctactaacttcataacttaatacactcaccactaatgatgcacattaaattataaaataggtttttaagtgaaaaatccaagatatgaccagtgatggtatgtccatgttcgcaaagctatcacagtaataaaatgtagaaaattgaatcattaacaacttgtggtcagcatctgacatccagctaccagttctcttgtggacataaaatctcatcctaaaaaatgagatgttagtagtcccacttcatatcaggcatatatccatttgagtttggctgtgcccttctggctagaataagcatacactctccattttctcctcaaactacctcgctatttttcccaggctctttcactaactcttagaaaagctttatgcctcctgtcccttacagtcaaccaaatgctcatttgtttgcatatctttaatagctgtgacacagatcaggcagattgcaaagtcaatcatatctattatctggctattacttgctgaactggcttatataattaactcaagcatttttagactgttaccaaaggccttcatattagactcaactgcctttcagaatctctgtttctatgttttctacacacccgaaacataagaccaattaacagatcaataagcaatgtgccaaacgtcttttctgagctttgttcatgtcacttcccttgctcagaaccctcttcctcatttcatcacattattaattcaatacatatttaatttagtgcctaccatgctccaaacacctttgtagattgtagggataaaccaatgaggaaaacagtcaaaaatttaggatctcatggagctaatggtcaagtgggatatgacataataaacaaatcaataagcatgagataagtatgtcagatggtgagtgacataaagaaatatgaagtcagggagtaagtaaaagtgcatgaggtgatgggggcaattttaaatagggaggagagagaaggccttactgaaaaggtgacatttgagcaaaaacctgaaaggcatgaagaatgagttcttaaagataactaaaacaaatgcctcaggtgaaaggaaaaggaaaatcaaaggtgctgaggtcagaagtacttgaaggacaccaagcagaccctgtttagctagaacagagtgaacggggtggcaaacagaagagctcaagatgtaataggattttggaaaggagttaggtagtgtagggtcttacgttgcaaagatttcagcttatactcaaataggaaaccatttacgatagggggaagactgtaagaatagctttgaagaaatgaagatcaggaatttagttttgaacatgttaaatttaagatacagtttatatattcaaatggagatgtcgaggagggagtcagatatcaggagaaatgcacaggctagagacataaatgtgggaggtctgttagactctcctgcatcccttaagatacagcttaaaaatcacttattctgtaaagtcatttgcaatcccatctcccccagtcagaattaatttaattttgtttatatcttactatataagatatagcacttatcactatctaatttgtactaaaaattattttatatatgcctgtctttttcatctggagagatatgctaactaaagaactatgtctattttattcttttaattctaaatgctctctactatatattaaatatagcaaataaccaataaatgctagcctaactaaacgtgttttgggggattttaattgacttctcatagttttcttcttaaaggcagggagctaaatatctatgacctaacaaaacttgttctttcttctgtgctatatatatatgcccaagtcaaatttaatctttcactctctctctctcatcttacaagacaaatcaatcaccaaatcttaacagttaccttctaaatatatcttaaatgtatccacatttctctagccccactggcattactgaatataagccttcactgctccttgcctaattaacaacttactgactgcttccactctgggccatagacaagggcaatacatatgtcaacaccaatcacagcggtctcttaaaagcacaaaatctattcatgtcacttctttgcttcaaactctcccaagtctccccactgcacccaggataaagttcatcctctttcacaaagcagaaggcccctcatgattggtcctgaatctcctctttcctcttccttctcttcatttcagacgctgtatccatgagcccaaggggcatgagcctactgtactaaattgctgggacttgttttactgtaggtatctcctctagtgcaaaagcccactgaaggcaagaattgtgtcatatttggtgctatatcacaaccagagtctgacactggataaacacaattaaaatacaaaattttaaaagtaaatgatatctcagggttcctccaaactttttaatctaatttacttttgtacaggttataatttaataatatattattatattaaattcggggtttctaaaaaagtatggttctccaacaatctccgtttcagatccatttactactgtccccattccaaagtaatgaactgggatgacatttatgattccttctatgttctagtaccaagtagtaatcatttctacaggagagaaagaaaataatttaaactgcagcaagtcagattgtacttcaccattagattgaatttatcaacactaaaggaatctgaaatgagtaggcaacctcaagagaaggggaaaaaatcaatgacaataaattgcctagaaaagcttagatatttgcctaatatttagatgtagctgtctagtcaaattcatttaaacttcatgagtctaatttgttacataaaatttggtcataataattcaaggttcaggctgaagaaagtaaactattctgaaccccagtttctaaatttaagtgaattttaaagatttaaaacacagaatctactggggattttaaaatattatttatcacagtgataattctccaacccaattttaatactttgtatttcagtcttcaagattacagattgttgctactaattgtctgtttatttttagatgaagtacacatcagaaacatcattgttcaaaaagggtgaaggcattctttccataagcccaaactatcccttgatgtgattccaaaacaatgctctgaatctgcactgccccaagacagcagccactagccacaaatggctattgaacacaaaatgtgtggctagtctcaacacagatgtgccatgtaaatagagacatgttgagtataaaataccactggaagacttagtatcaaaaaatgtaaaatatctaataattttatattgattacatattgaaataatattttggatatatacggttaagataaattattaaaattaatttttttttacttttaaaaatacgactatgaaatcatttaattacataagtggcttatatttgtggtttgtattatatttccattggagagtcgctctaagtctacttagaaaactgatcaacactactgatctgcttcttcagggagaataaaaaccatcattgagaggtcagatctgaaatggaatcaccaatgatgcagagaaatacaaattatccacaaaactttaaaaacagtaaattatgctataaataaaagattgctttagtgtaaaaaaaggtctcttctttaaaataaaaagaattaacattttaaccttcatttcataggaataacctcaattttgggtaatattattctttgagtattgggaaaatttaagaaatagggattttaagatattcaagtaacagctccccctcagcaaaaaaacaattaagttaccagaaatgtgaccctattcttatttttttctttctgaaaaaatttaaatcttcttcataccttacatttcgtttttggaaaatctcacaaaaacattttacagaatgtatactatattaatcaggcaaggtatgctttaggatctactcaataaaatgattcctaccaccccaccatcatatttcaccatctcctctctactgtttaacatttctttagtatttctaggaactccagcaagacaatacaaataaagttgacaattataactaataatgactccacctgaaatatgtgatagctgaatgaaatatttacatatatttacatatattacagtaatttaagtgtgttcttttttttttttttttttttttttgagacacagtctccctgtcacccaggctggagtgcagtggcgctatctcggctcactgcaagctccgcctcctgggttcacgccattctcctgcctcagcctcccgagtagctgggactacaggtgcctgccacattttttgtatttttagtagagacggagtttcaccgtgttagtcaggatggtctcgatctcctgacctcgtgatccgcccgcctcggcttctcaaagtgttaagtgtgttcttatatatttatctctattataataatttaaatatactttctaaggtgccaaaatataacattttaaaaataaacaggatcaaaacaacaacaacagaggcatgattaaattcctcctgttttagaaagaccaaccaacaggaggttctttaaatagcctgtataaccatatattatacaattgtcaaagtatttgaaagtcactaagttttagggcccaaattagctggttatcaatataaaaatgggggtaatttatcaatgccctacttactatcctacagatattagggcatggtgatggagatggagaaggagaatatacacattggtggaaaaatatcagtaggcttcacaaagtaagttctgaaaaaaattttgtgcttccaaacataatgaaacatattccaaacataagagggagctggatttgactccttattatttgtgatgaaacaagaataataagaaaaataaggaagaagaaaggtaaagaagaccatgtgatttcttttgatgttatagttgtttagatttcttttttattttttttacaggtagggtattttaaagaatttttagagaaaatgaaaccagacacaaaccaattaaagaatcttgaaagaaaaaggctgaggttcaggaaaaaaagaaaacaaaatcactagcatctatcatatgtacctcctgcccatcaaagcaatgaacaggaatgtctagtacagatagaggcagaaagctgaagatacctactattgctattataaagcagcaaaacataatattcaaattcatgacttcatttttgtttatatttctagtagcaaacttaggtatgaggttaaaatttggtcatgagatgcttaacaaatgaaggaatttggaaagaaaaaaaaacccacacataagtcttcaatttcataacaaaatgtcaggcttatcaatattttcatttctcttattatttctcaaaagagttacataagtaattaaacagctttgagattagaggtaaaatttaacaaaattattatatctgttaactattcttacttacttttatctaaacatccaattcaaaattatttactggtgatttttaaagagtatgatatataattttcaagagtatatcagagtatattatttgtgagatcaaaaaccctgatagatgtcccaataaaagattatttttgtatacaatagaatcttctttaataaagtatctttcacataagcaatgtactctacagtaagatgtgaatacattttgtagactttaaagtatcatacctaaaagcaagatgcaattgtcattatactgaaaaaatttttaagtactctacagtaacatacacattagcagtataacttttctccttttggactccaatatttctcatctggcacttattttctcccatatggtataattatttatatatgtcatatttctctatggaactataaggaacttcaaaaccatagggatatctcattatacttaatagatctaacacagtacaccttgcagaaagagacaccatttaaaaaaaaatagactgtatttctgtaggtagaagcaaaattctagtaaggactattactagctactgtgcagtttttgatcctttgatctttcatgcatatagatagaataactcttgtttttgctttattaataatggaatgctttactaagcaaaatcaggtatgcttttagaaccagcagcaggcaaaacacaattatttcaagaacgggtacataggatatctaaatatctatgtctgagatttttctcatggtatttttcagactatagtaattttgttcactgagtttggaattccagccaggcacaatggctcacacctgtaatcccagcactttgggtggctgaggaaggaagatcgcgtaagacagttcaagaccagcctgggcaacatagggagaccccatctttacaaaaaataaaaaattagcctagcgtggtggtacatgcctgtggtcccagctactcaggaggctgaggcaggaggatcacttgagcctggaaggtcgaggttgaggctacagtgaattgtgattgtgccactgcacctctagcctgagtgacaaagcgagaccttgtttcaagaaaaaaaaaaaagagttcggaatcccattacgcatggtgccttacatgctttacattcacactacctaccatattttcccttcaacaaaaagattctaaagagaaagggaaaataaaaaaaacactctacaacaaaagacagagagagaggaaggagagattctgatagaggagagacagtcatgtagaacttacagggagaggccgggcgcggtggctcacacctgtaatatcaacactttgggaggctgaggcaggcagatcacttgaggtcaggagttccagaccagtctggccaacatggtgaaaccccatctctactaaaaaaaaatacaaaaaaactagccaggcgttgtggcagatgcctgtaatcccagctacttgggaggctgaggcagaagaatcgcttgaaccctagaggtggaggtggcagtgagccaagatcacgccattgcactccagcctgaaggacagagcaagactctgtctccaaaacaaaaacaaaaacaaaaacaaaaacaaaacaataacaacaaaaactcccagggaaagacaagagatagagacagagagagacatgctgtaattcttggccatttaattaaggacttatcttctgagatttatcttttgtaaatagggctgtatggcagtagagaaaattttcaacattcactcaacaagtaatgcactggcaataacaactataaaacaaaacatttctgtaccttaatatcagaggtatcacgctgactgtttcgccaagctctggaaattgatgaaaaagttcgatctgcatgatcaaatttgcctccttgcaaatttaggaaataagttgtaaagggttcctaaaaaatagcaattaaaaaaatccatatgttccctcaggcataaaaatgtggtttttataaattcttagaactaaatactttaatgactaataggcattcactagtaatataaactaggtatataatgagaattatatctaaattattacattaatgttctcaagttatttttccctcaaaagaaatatttctaaatatttcaaaaatttggtatttgcaacattttcttcaggtagccttcctttccaagaataatgtattaatatcatacagacataaattagatgtattttcttcatagtacagggaatagtccagtatgtagttttcctattgttatggctcaatatttaatttatgattaagaaaagaaaaatgtttggatgatttaaaagcctcctcttagttaaagaacacttaaacacatattagtggataattgcttgaaattagctaagcactataaattacttctaggatttatgtctgcctgtatccttctaacaagctttaattaatgatgtgctgctaatgcttttccgaagaaattgctttctagtagatgaatcacctttcaatttcacagaaacatttcttgtttaaccaatatattatcaatacacgacagccttagttttaccaacaaacttaccttattccatttgggacaaccttccaaaatatataagtacatgtctgtgttagtaacaacttacttagttcttattttaatagactacattttaaaagaatttatgctacaatttggaatctggtaagacagcaagcatctgaaggggcaaatttaagaaaaaaattcatacaattccagatgaaacatttttaaggcaatacaagccaaatgagatagagatatttataattagaacttcaataatttaaactgactcttttagtattcaaaaaaatatgcttatgagttctaatttttgcatatccttcacaacactgaatttatttagccatggtgtattattcaaattgaacttactattcttagcagccatgcaagaacaaaacttgcagttgagtaatgagtaccatagtgaaactttggaacttgatcatcttcccatgattcataacgctcagcgaagaatgctgctctttttgggttcagagctcctattggctgccaatagggagggaaaaaacaaagaatacatcaatgtaatcatccttcatgtcttcctctcttctgatgatatcctactggtaagtataaaagtgaattttaaaaatatatactacttaagctgcaacacagtatcatattgggagtaaaaagcaatattttttccaacaagttaaacacaacatataagtaagtgaatggatgaacccatcatttctccataagtctagttttcatggaacataggtgtttaatcatcccataacaagcatcagataaagacaattacatgaagtgaaatatcagctgtacaacactttggaaagcacctataaaaccacatttagttaattagaagcaacaaccagaaacagaatcttaaagctgaaggactgacttataatgggttcttagaagaggatgaaacaaaactgggagataggtgagatggagcacaaaggaagaaagaaattgtgggaaaacagggttaagaaactagaaatttctactagtgtgagtgaaaacaaaggataaaaatatgcctatatgtctatataggatatatagatatatacatatatatgtatatactttaaccagaggattaaaaatatgccggcatgaactctctctctctctctatatatatatattataaaattaaaaatatcacattaaaaataatgctatatatatatcgcattaaaaaaagaatagtagacagattatgaacttatactggaaaataatactttacagcagaggtcccagagcaatatagcaacatggtgaaaaccctgagctcactggaatgataataatactcattcaaaaggttgttttggaagataaaaatgagtaggtacgttaaagtccaacaaactatgcctgacaacgttcaatgaatgctaactatggtttttaagataattgtttagaatttgggttaaagagtttgaatgaaataattgcctttagcaaattgcttagcataagataaagcttaataaatgttagttggtacctgtatctttattattgctactgctgttgtcatttaggtaatacacgaactccattaaatagcaggcaaaattctgtgtgatcaagcctatgcatgtacatatccttacaaagacgtagagaatatgcttgagagtctcaaaggagtctaaggctcaaaaaatgttaagatcaactgctttaagtaacaattcattctcaaaaaacattctgatctctagaaaatctctattccgtattcaaaatgttaagtacccactcactgaaaaagacatgatatataagattacttcttttcataagatacagaggccaggtgcagtggttcacacctataatcccagtgctctgggaggtcgaggtgggagattgtttgagtccaggagttcaagaccagcctgtgcaacatagtgagaccctgtttctacaaaaaaatttaaaaatcggctgcgcatagtggcatgtccctgtaatcccagctactcgggaggctgaggtaggaggattacatgagcccaagcaccttaaagcctacagtgagctatgattgtgccactgtactccagccttggtgatggagagagtccctgtcctgtctctaaataaattaataaataaaaaattctttatttaaaaaaagatacacaacagtcttttgccttatatcatttatgaacacctattagttaatcactccttatttataacagaaagaaaatatctgattatttgtggagaaaatgttaaaataaataaatcaaaaatattggtttaaaagggatgcactgagaaatattttattgaaaatgaagcaatgttcagaccagtttttaaactgcttttcatgttacatgttaagcaacatcttaaatttatcattttggttatccttattaaattgttaattattttttcaaaactatctttggcatcatcactcaatagcttggttttaatgaatattattgtatgttaaggcattttttcctttacaagcaaaattttaaaaatctttaattaccattttaagtcagtttcacagtaaactaatttaaaatgctatcttttaaagcattagtttctgtacaaaagaatcatatctgacttactaaatatgtgccagttaagaatggagctgactccaaggattctttctttgttacagaaccaatttgaaatgcctttaaatgtattttagttgttgtccctaaagaatgagccatggaaaagaaaagagagaagaaataaaatcactagaagacaaattatatgaattaaaaatagaatcaatgctccttttgtatggtctgaagcataataagtattcactttatctgctcctatttttattactctccaaatgagtaacccccaaaatcaatagttatagaatcacgtttcttgaatataatgctaaaaccaattaggattgatttcactagcatctgaaaaaaaatggcatcttgcagagatccatattggtagaacccacagtattgattttggctgttattgttacagttggtttctgaagcctgctatacgacagctatcaagacataccacgtttatttgcaagcatataaaaaagaagtccccaaataaaagaaagttaaaaaaaaaagaccagtggagctgtgcaatgacaatgatacactatcagcttactcagagaagttacagtgggaatacacacattgaattatacattacgcgaaagcactgatttattgtggtaataacatccacctcattaaaagattctgctttgctgcagttggaaggctacatattgtttactgctataaattaatggcagtgcaaagaagactgtggaaccatcctaacaatagatctgtaatgacagtgctgtatatcacagcttcctcagcagcttcataataaaatggagacaatgtattgagctaatacattctaccatgctggcccacatttttctgacaactgctttaaaagatgatctgaattcaactatgttataatgctgcaaaacatttaactaagcaagagtcagtcatataccaaagtgcatcaaagcatttttaaaacattgtctaaatcagcatttcaggatgtttattcatctctgcaaaagaactaaaagtaaatgctgacggatcctcttacttatatagtatattaagagtcaaaattctaagtcagtttgggaagatgctagcaccatcatcctacatagagcttactgtacaatgtaacaagcttgacaaagtatttttcttaaaaagcaagattttaaaggaaagtgactcaaaatactggccattaaaaatggtcataatttcttttaaaaaatcagtaaaagtaagtattgattagaaagtataaaagtggtataattccaggtaaacacaaatagctctagaatacagaaaaataattttaaacactacaaaaagctaacaaataaatagaattatagaaggttttcttaactctacaaactaagaaaaaatctcaatcacaatacaatgaaaaataggtttaagtaaaatagaatagaataatttaaaatgtagagtattaggtctaacaacaaaatattatgttaaaaatataaataaaggacaggcacagtggctctgcctgtaatcccagcattttggcaggctgaagcaggagaataacttgagcccaggagtttgagaccagcctggacaacatgatgagatcctgtctctataaaaatcagaaatcagatgggcatggtggtgtatgcctatagtcccaactacttgggaggatcgcttgagtccaggaggttgaggatgcagtgagctgtaatcgcgccactgtactcagcctgggtgacagagtgagaccctgtctcaaacaaaacaaaaagcagaaataaaaacttagattaaagtaggaaaagacaaattaaagaaaaccaaaactcttggaaatggtatgaatagccaaaaatcactgtatttaggatattttaataatttcacaaatagcaaagctgacatctgtggtagaataataagtattctgcttatgagataataatgatatctttcaaaacaggatatgcaaaataaaacttgtaaaattggttttgtaagaagactgcaattaaaaaaacattttttgttacgttctttgagaagtaattttgctagttaacaaaatccctgcatataaagtgatcagttcagtgcctggtacataataataatgataataattattatttttttcaggttatttgatgaagaatatttaataaaaaaaggcactaagtaagcctgatgaaattaatgggatctattaggaaagaccgtgattaaacatcacaatcctctaaagacaaagcaggataagaacatatagtactgtggatgatctgtaagaagcctaagagtaaacagtagtccccatcaatgaattttactactttaagaacataatcaaaacaaaattacttttcaaaaatccaggggcctccaaattttactacgaaaagcataagaaatatcaagcaacttataatcacctcctactatattatttataaagaaacagtttgaattaacagactcctttaaaagcacataacagactttggtctaatattagtaaaagctgtaaaaaggtatctgttttttctttctttattaaaattttaggaactcttacctgaagttatctaattaagaataccacctccagcttacattttgtaatttattaaacattattatacattctcataataaataggtaatctagatattcctattttaataataaagaaatgaattgagtaacctagctcgaaatcaacataaatttagaagactcaaacctagtactcaaaagtccttctctgggccatgttatgtatttatatttaaaactattgtattacaagttggttttcctaatttcaaaaatgtgctgtaatctcaatttttcaaatatttctttacttaacaggttgatttaaaggccaatataagtaagcacttagaagagttcctggcacacacacaaaaaaatacttaacaagtgtagctgctattaatgtgcttatataccataactataattccttctttccttctgaaatttatatatgaatgattacaattaatatcaacctttcagaagtgaaattccaaactactggactatacttatagttattgaaggtaagaaagttctgggaaattggcaagaaatctcagattttttacaaagcagagatttgcttgtgttagctaacttctcttttaaaacccaaaagtctcaagggagtttttcacacctttctgtaaaggctttctttggaaaatcattaaactccaacgtttggagatgagaagcagaaaagattggggttaaagaaaaggaaaaaaaggtaactctaaaccaaaacactaataaatagggtgcttgaaaatgcttaagcatagtattttatcaagatacattctgtgggtatacagaggagtgaagaaaagttgtcaaaactgaaaagaagctcaggaaagggaggcaaaagagcaggactgctttacaaccctgcttaggatcctgatgactggctgaaagccatctgccaatgtaatcttcatttgatatgactgggaaatcagaaacatcctttaatttcgtgatgacagataaagcctgccttacagtactgaagaaggtgcatgcaattagaggttatatgttatttcattcttccctaaaagtagggtaggccacaggaaacaaaagaaaaccactgcaaagtaagaggaaaaaactagtaaggaatagaatacaagatggctgaactcaatgttcttctatgctataaaaatgtcaggttaaaggacagaatatcatcaagcatctgatatatgttaacatattaagtaaaaaatttcaaattcagagaataaaagaggatagatacactattaggaaatgttacatcataaaagatggtcattcttgattagggaataatgatttggtctgagaagactccagggaaaaactatgatatatatgtcaaaggtgccattttatctgatgacaatgctactatttgctgaatataagcaaaggttctacgagtcttacataaatcatctcattatctttacaacaactcttaatacaaagaccaattagcatccccaatttgcaggtgaaaaaaacagttcgggagaaagtaaatgactatcagtggttggttaccagccagtggcagcagcaagattaaaagccacctcctgactttttaatgatcgccattctaactgctgtgctgcagaggatgtagagaaataggaatacttttacactgtttgtgggactgtaaactagttcaaccattgtggaaggcagggtggtgattcctcagggatctacaactagaaataccatttgacccagccatcccattactgggtatatacccaaaggaatataaatcatgctgctataaagacacatgcacacatacatttactgcggcactactcacaacagcaaagacttggaaccaacccaaatgtccaacaataatagactggattaaaaaatgtggcatatatacaccatggaatactatgcagccataaaaaaggatgagttcatgtcctttgtaggaacatggatgaagctggaaaccatcattctcagcaaactattgcaaggacaaaaaaccaaacaccgcatgttctcactcataggtgggaaccgaacaatgagaacacttggacacaggaaggggaacatcacacaccggcacctgttgtggggtgggagcaggggggagggatagcattagaagatatacttaatgtaaatgatgagttaatgggtgcagcacaccaacatggcacatgtatacatatgtaataaacctgcatgttgtgcacatgtatcctagaacttaaagtataattaaaaaaatatatatatatatatatatttttttttttttttttttttaaagccacctccaaccaaactgactagcaaatcccagagtgatttgggttgtgtggactggtacgctgcctctgcaaggccattagaatcctttcatgggagctttagattaaatgctcttttgaaaaaatactattaaagtttttatccctacttacataatgtctgtggatatcaccttagaagaaggcatcaaaaccgaatttttttaaaaagcgtattttatcttggggacatcaaaaacatgcttggcaaatacagtttttttaaaaaatgtgaacaaaaaaggtaaatgttgtcaccaaagtttattgccttatcttccttttaacttttctgtttttttcttttctatcttttccatgaacccaaatgagagcccttaattttctgtgttgctgaggctttttatagaagccaatgaatttgattcccagtgtctccatcacctgccttcctcccccaccactctagtgaagaaaataaataaataaatagtgtctgtcatttcagcaacattgccactgttagggggtgcagcaactattttctttcaactgtagcgctctttcatctaaatgacaagtataacaggcagcctgatcagcattttcactcaaccttggcttttagggtatttcgttatatgctatataaggccgaaatggtttggcacttatcctcacatgctctagattttatttaatactgtcaagaaaaaaatttcatcagcacaccaccgtggcttttagagttaacaaataagcacttttgttgtcaagtaccagaacactttttaatcccttgaaaacacatcttcttacaagtggcattaaatatatactcactacaccatttcgatttaacaaacacatcttggggaaaagaaagtattccattttacttattgtgcctatgtagaatctaaatcatttcaaatgcttgcactgatagatttactagtgatgtcttcatagttctatgttattcagctacacagtaagtattaagtaatttttctacaggtgtttatctcattttgagaaaatcacataaactgttaaaaataatctattaatccaatgccactgctgagctaaatgcctataacgaccccatagacagtccaaaaaatccaaggataattactaaaaatgttttaagttattatgaaaatgataaagaatgctgatataacaagatctatcaatttgcagatatattcatctgcccacttaaaaaaccagttaaggccattaaaatcaaataaatctatatgcttttaagataggtcattagtggcatacatgtcaacattctgctagcttctataaaccagaaacaaaacaaaattgggaactacttaagaaacattcagcttttgaaattcattttctatttgctttgaaagtcatctgaatataataaaactggttttaatttcggaaaacctctctctctctctctctctctctctctctctctatatatatatatatatatatatatatatatatacatatatacacacacacatatatatatgttgttttgctcaacgctgagttgggaaactgtgtgcttattgtttagcttaagcctgggctaatggcactaaatatttcaatgatttgcatgtgaagcacaacaaaatatatgattataaaaagcaaggaggattccaaatccataaagattagtaaaaatagttattttattctgttttagactaataaattgctttttggaaaaaatattaaatcgttttaaaaatgtgtttatttatttagagacaggctcttactctgttaccctggctcacatgcagtgatacagccatagctcactgcagcctcgaactcctgggctcaaacgattcttctgcctcagcctcctgagcagctaggactacaggtgcatgctaccacactgacataattttttagttttttgtagacccaggctggccttgaactcctggcctcaaacaatactccctcctcagccttcctaagtgctgggattacagccatgagccaccacccttggctggaaaaatactaaatcttaatacaaaaattagacataaagtagcataagttaaagatatcaatatataaggcatggatggaactagaggcattatgttaagggaaataagccaagcacagaaagataaatatcacatgttctcactcatattttggagctaaaaaaaaaagtggatctcataaagattaagagttagactggtggttatctgaggccaggaagggtaaggggaaaatcgatgaagggagattgattttaaaaattatgttaaagaacacagagagagccaggcatctgagttgtaaggcattttaaaactatagtgtacttcaaatatcaaacaaggagataaaatattgtttggcaaatgtaaatgagcctatgtggtagctttcagaagaaacagggcaactggaatcaatttaacaagataatctctaatgattccataagtgcaacagaagacactctaataattctcatgacttaagaatagccatgggtcatacataagagctggtaaatgttgataacgcttttggagtagattattagcaatgtgaggactgacaggcagttacattgcagttgtattcctagaaaaagcccaatcctggcaaggaaggtcaatgatattcaacctctaaaacaatccccaaaatgaagcccttataccaaaaagcagactctgctaaaatagtccagtccctgtatattcctccccagtgctccctcaaggaaagcaaaatccactagtcgaataaaacgggagcagccagattgctgaccaaaaactttgctccattgctggcgaaatgagtcaaaaaataaaggcggatgagattcacaactgctatctaaaatttaccttatttctctgtgcaagagggtatgttgggatagtcatcaacatagagaacttacattttaccctttttaaaatgaaaattttattgtacttttccctctacaactatatatctgatctatatggtgggggagggggttaaatttagtcatttaattgtagtacagtgataatcaatacttatgagggactagaaataagccagtaaagctcggatttagaaaccactgcacctgcaatagctggacagggttttgggctgcctctacaatttaagacaaaaagaaataaaacatagcataaaacataataaaaatcctttgttcagtttataagttactaccttccctttatcaactggaaaaaaaataacctcatgtaacacaaatcatatgaaataattttatgtgtcaacttgactgggccacagggtgcagagattaagcattatttcttggtatgtctgtgaagatgtttccaggtgagattagcctttaaactggtggacacagtatatagatttctttctccaatgtgggtgggcatcatccaatctgctgaggatctgaatagaagaaaatgcagagaaaggaggaatttgccctttttttcctgtctcactgctgaagctgagacagctcatctcatcttttcctgttgtcagtctgggatttacaccatcagctcccctggttctcaggcctttagacctgcaatgaattacaccaccagctttccagggtctccagcctgcagatggcagactgtgggacttctcagcctccctaatcacatcagccgatttctcataataaatctctttttggatacagatacatagataactcctattggttctgtttctctggagaacctcaagataccacatcaagaggaaatgaaattaattcataaggtaaatatagagtatttcttcatattttgagatcaatattgagattacaatcacttataaaatagaatacaaagttttataaactacctcattctggtaatagatggcaaaactatggttccaccatccacactccttttcccaaatgaggcaccttttttaaaactttcaaatttgacattacttaagaagctcattttaaaaagtgatttaacaacacgtggaggtcaaagaatgcactagacaattcacaggaagaaaagcctaagaagtccattaaccatgtatccaaaatgggtaatttcatatttaaaaagctagctaagttgaccatttcctactaaaaggaaccagaggtccttaaacaaatcgctgattctaattctggggcaggaaatatacaaaatagcctaggacaccttgttgtgccacaaggcaaaggatttgtcaaatattaatgggattgtatctaagggacataagacccttcttaaagagacctcactagacaaagtcgtggcaatttcggtaccacaaagaataatgcagttctaccttcatataaaaatgtagaaagtatcagggaatgttgctgtcattgtaacaacaataaaaagactaaaagttgataaccatttttgtactaatcagagagctgaggtaaaagacaaccaaatgaagtaaattccaaaaagttacaggcctcttcaacgagagatggtacaaactgctataattttggcaaagcatgggaggaagaggtagtcaacataaaagtaggtaagaagaaggccgggcgtggcggctcacacctgtaatcccagcacttcgggaggccgaggcaggtggatcactggaggttaggagttagagatcagcctggccaacatgatgaaaccccatctctaataaaaatacaaaaattagccaggcatggtggcaggcacctgtaataccagctacttgggaggctgaggcaggagaattgcttgaacccagaaggcagaggttgcagtgagccaagatcatgcccttgcactccagtctgagcaataagagtgaaacagtgtttcaaaaaaaaaaaaaaaaaaaagggggggggggtgggcaggaaagaagaatctgctaaaatttataaagaatttctaaataccagtattgggtgaatagatcaatgtagaaacacacgggagtttgcatgcacttgtaagctcttttccacgggcctctcccattgctcatgagagagaatacgactgaggcaaggtagaagaccagggggtagctctctaagtaacacaggcacacaggatatgatttacagttactgggaatggcaacaaaacagaaatcaaaatccttaagctgatgggagaggaacaccaaactctcattccaggtcctaagcaaatatcaacttgcacatggggaaagagtacgagcaaaactaatctaccgcaggaaaagggatagaaaatcctgtgtaccacccctaggacccaggcaaagatccactgcttctggggtagggtaaaagcaaaagccctttcaagaagacatgtcctgcactgatgcaaagaagaggtctgctactactgggagaaggataggaaattctttcctgtggatgccatgaggggtagaggcaagaacactgagaaagtccgtacctgaggaccatttcaatgggatctacttaagaatgaggatgaatcaggagaactgaggagctaccctatccaccccacaacaagcctggcactgagttaccaacaacagcaatctacttctggaaaaaaaaaaaaaaaaccagaaaagtacataaaaaaatgcctctgtggcacaggcatagagggtcggctagagagtagagcaagaacagtgagaaaaaacatccaccacccaggccaaattcttacagaagaatttgaagtttatactgtatttaaggtaataatagcaataacaaacctaactaagcttatctattgactagattgactgaactccccacactaactacctgacataagaagaagcatatacttctttgggcataaaatcttattcatatcccagcctatactgttctcctatctcagataaaatagaatcataaaaataatctaaaagaagcacataaagggagacaaagtacaaagaactgatgtgtagaataaaaaacagcaagaaggtagatttaagccaaccatataaaaaattacattaaatgtaaatgacctcaacaccccaattaaaatgcacagattgtcagactgggcatgaaagcaaggctctattatatgttgtccataaaaaaaaagttaaatataaagccatagacaggcttcttaaaataatagaaaaaatgctgcaagtaataatcaaaataatgccctcctgggatattaacatcagaaaaagtagatttcagaacatgaaatattactaagtataaagagggacattgcataatgaaaaatgaattcttttatcaaaaaaataacaatttgaagagtgtatgcactgtattagtttcctagggctcctataactaaatatcacaaactaggtggcttaaaacaatataaacttattgcctcagagttcttgaggctagaaatctgaaatcaagttgttggcaggttcatgctctctttgaagcctctagaggaggatctttccttgcctcttccaggttctggtaggctcagctgttccttggcttgcagcaacacaactctaatatctccttccatcgtcatatagtgttctctccctgtatgtctgtctttatatgacgttttcatacaagaacaccagtcatattggatttgggcccaccctaatgaccttatcttaaattgattacatcttcaaaaaccctatttatgaataaggtcacattcataggtacctggaggttaggactttaacatatctttttggaaacaaaattcaacccataacatgtacccaaaaataaacttgaaaacacgtaaaataaaaactaacagaactttggtgaggtggggtggcttacacctataatcctagcactttgggaggccaaggcagacaaatcacttgaggccaggagtttgagaccagcctggccaacacggcaaaacctgtctctactgaaaatacaattagctgggcagggtggcacatgcctgtaatcctagctactcaagaggcgaggcatgagaattgcttgaacccaggaggcagaggttgcaatgagccaagatggcaccattgcattccagcctgagtgacagggcaagactctgtctcaaaaacaaaacaaaacaaaacagaacaaacaaatagaaaaactaacagaactgaaagaaaatatagacaaatctaacttatagttggagacttcaacactcttctttcaggattcaacaggacaagtagaaatcagtacggatacagaagacatgagcaacgacatcttcaaccaattttacttaattgatatttatagaacaatacttaacaacagaatatgcactcttttcaaatgcacatggaacattaatcaaggtagactatattctgagccatcgaacaaattctcagtaactgaaaagaactgaaatcatacagcgtatgttcctcaaccacaatggaattaaactagaaataaacacaagaaagacatctgacaaatccccaaatacatggtaactaaacaacatatttctaaataatccatgggtcaaaaagcaatttacaagagaaattagaaaacatttaaatgggatgaaaataaaaacaatatataaaaatgtgttggacccagctaaatcagtgctttgagaaaaatttgtagtgctaaatgcttatattaaaaagaaaaaagttcttaaatcaatagtttaaagtttgcaccttaagttactaaaaaggaagataaattaaatctaaatcaaatagaaaaaatatagtatggaaagcaaagatcataggaattgaaaacagaaaaagcaatagaaaaataaataaaatctctaaccagactggtccagagggagaaaaagaagtaaatgccagtatcaagaatgaatgaagggacaacttagatgaaataaacaaattttgtgaaagatgcaaactaccaaaactcattaacaaaaagataacccgaatagcactttatctgttaaggaaactgaattcaaagttttacaaaaaaaccttcccagaaacaaaactcttggcctaaatggcttcactcatgagttccaccaaacatttaagggtgaaataataattgtatatcatcttttccaggaaatagaagaggaaaaaacaacttcaaaactcattttgtcacgtaagcattaccgtgatgccacaactaaacaatattacaggccaatatcctttgggaacatatatgcaaaaagtcttaagaaaatatttgcaaatgggatccagccatttattaaaaggataatacatcacaatctggtttatcacagaaaggaaacactatacaatcagccagtgtaattcactatactaaccaactaaaaaagaaaacgcaattatcttcagaaaaagcatttgataaaagtcaatacccaattatgatgaagactctcaacaaacttcttatagaagggaacttctttgggaggccgaggcaggcggatcacaaggtcaggagatggagaccatcctggccagcatggtgaaaccccatctctactaaaaatacaaaaattagccgcgtgcggtggtgtgcacctatagtgtcagctactcgggaggctgaggcaggagaatcgcttgaacccgggaggcagaggttgcagtgagccaagatctcaccactgcactccagcctgtgcaacagagcacgactccatctcaaaggaaaaaaaaaaaaaagaagggaacttaacctaatagaagcacctacagaaaagcctatagctaacatcacacttaagggcgaaagactgaatacttttcccctaacacaaaagacaaggcactctcagtacttgttaaccttgtatagtgcagtaagtcttcatttcacaatgccatttatgtataaagtcccaaaaagtctacaaaaaggctgctagtaataataattgagtttagcaaggatgcagaatacaaggtcaatttacaaaattcagctgtatttctatatactggcaacaaacaactggaattaaacgttttataacaagattaaaaacatgaatttttaaaggataaattaacaagatatgtgtaagaattgtatgctaaaagctatggaacatttgagagaaactaaaaaaggactaaataagcggaaaagacactatactaaggaattggaacattcaatattcttagtactttatttttacccaaaatgatctacagattgaatgcaatcctaataaaaaatctagaaggctttttaaaaattagaaattaacaggaagcaaaaagcctagaacagccaaacaatttttaaaaagaaaaataaagctggaggattcacatgactttattacatgatttactataaaaccacagtactcaagactgtgatactgatataaggatatactgattaattgtgaagaacagagtctagaaatagacctacacatatatggccgattgatttccaacaaagattccaggagacctccagagaaaaagtctttctaacaaatggtgttagaagaattggacttctacacacaaaaaaatgaaccttaactcttaccatgaacttacaatacattctagacaaaaaataagtagcattagcagccacaatacagaagaatagtaataattctgtttgatccaagttgtttttagaaaacccattaacaccattgggtcaaaataagtagatagtcaattacataatctaaatcagcagctttcaacttttcctgtaagacagtctctaatatatatacacgtacactatctattcacagatctcttgcaacaaacccacagtcccctcaagtgaccagagctcacaggttgggaacaactggcacatcttcatcttcctttctaccaacaagacaccagcaagtgttatacatttaacactgactaatcttaaacctcttttcttccttttcctgtacgaaaaattcaaccctaaatgtaagaattcataatagtccttcatatttcacttgaatatttcatgtgaatgtttcgatcaaaacgatttaaaagttttttttttctttctttgagacagagtctcactgttaccgaggctggagggcagagcacgatctccactcactgcaacctccaactccctggttcaagatattctactgcctcagcctcccaagtagctgggattacaggcacgcaccaccacatctgactaatttttgtatttttagtagagacagggttttaccatgttggccaggatggtcttgatctcctgacctcatgatctgaccgccttggcctcccaaagtgctgggattacaggcgtgagccaccacaaccaacctcaaaaatttgtattttaatttgtgtaaggtaagctacatggtcaatttgttatattagtgaaactgctgaacaagtcagaaactgggacagaattctaaaaagatgccctaaagaaggcaatatctcaagtttataaagacaattaaacaataggattgtatgatgatttgaacagttattaatgttactaacgacttttaattaccttgtctgtatttcagacaggtaacactcagattttaaaataatttactgagataggtcacactagatctataactttcccaatttactggcctaatcaaaacttttatttttcttttttaaatttttaaaaatttcaatagctttagggggtacaagtagcttttggttaagtggatgagttatatagtagtgaagtctgggcttttagtatacttgtcacccaaagagtgtaccataggtgatctttcatccctcgccttccccctcagccttctcccttctaagtctccaatgtccgttatgccactctgtatgcctttgcatacccatagcttagttcccgcttacaagtaataacatgtggtatttggttttccattcctgagttacttcacttaggataatgacctccagttccatccaaaaacttttatttcttattattaatttttttggtgttcagtgttttttatttttttttattgcttactccagttttattttattttttattttttttattatagtttaagttttagggtacatgtgcacattgtgcaggttagttacatatgtatacatgtgccatgctggtgcgctgcacccactaactcgtcatctagcattaggtatatctcccaatgctatcccctcccccacccccaccccaccacagtccccagagtgtgatattccccttcctgtgtccatgtgatctcattgttcaattcccacctatgagtgagaatatgtggtgtttggttttttgttcttgcgatagaaataccatttgacccagccatcccattactgggtatatacccaaatgactataaatcatgctgctataaagacacatgcacacatatgtttattgcggcattattcacaatagcaaagacttggaaccaacccaaatgtccaacaatgataggctggattaagaaaatgtggcacatatacaccatggaatactatgcagccataaaaaatgatgagttcatgtcctttgtagggacatggatgaaattggaaatcatcattctcaatgttttttaatttttaatttttataggtacatagtttgtgtatatacttatgggatacccaagatgttttgatacaggcaagcaatgcataataataccatgtaaaatcaagtgtctaccccttcaagcatttatcccttgtgttacaatcaaattatatttttaattatttttaaatgtacaattatattagtgttgactatagtcaccctgttgtgctatcaaatattaggtcttattctatcttgataatttttttttgtactcattaatcatccctacctatactccattccctcaccacccttcccagcctctgggaaccatccatccttctactctctatctccattagttcaatggttttgatttttagatcctcacaagtaagtgagaacatgtgatgtttgtctgtctgtgcctggtttatttcacttagcataatgacctctagttctatccatgttgttgcaaataacagtatctcattcttttttatggctgaatagtactccattgtgtataagcaccatattttctttattcattcatctgttgatggatacttaggttgcttccaaatcttggttattgtgaacggtgctgccaacaaacttgggagtgcagatacctctttgatacactgatttcctttctttagggtatacacctagaagtggaattgttggatcatatggcagctcatttttagttttctgagaagcttcaaaattgttctccacagtggttgcactaatttatgttcctaccaacagtgtacaagagttctcttttcttcacatgctcaccagcatttggtattgcttgccttttggacataagccattttaattggagtgagatgatagctcattgaagctttgatttgcatttctctgatgatcaatgatgttgagtgccttttcatatgcctgcatgccatttgtatgccttcttttgagaaatgtctattcaaatcttgtgcccatttaaaaaattggattatgagatgtttttcctatagacctgcttgagctccttacatattctggttattaatcccttatcatatgagtggtttgctaatattttctcccattctgtggcttgtctcttcagttttttattgtttcctttgctgcgcagaagcctttttaacttgatgtggtcccatttgcccgtttttgctttggttgcctgtgcttatggggcactactcaagaaatctttgtgtagaccaatgtcttggagagtttccccaatgttttcttgtttcacagtttgagttcttagattcaagtctttaattcattttgatttgatttttgtatatggttagagataaggttctagtttcattcttctgcatatgaatatccagttttcccagcactatttattgaagagactgtcttctccccagtgtacgttcttggcacctttgtcaaaaatgagtccactgtaggtatgtggatttgtaaaatcttttctttttaaagtaaataagttaatgcagttcaacgggatgtgtatcccagtaaaactactgattttcttttcctctaaattaaaaaaactatttgtctattctaatttttatattgctcccacaataatatgattttgtttgcagaatttactcctttccacttccaaaaacttgcttcaaatgataaattttggattcacactttttaaaaaattccttttctgaaagtaagacaatctaaaaattaagctactgaaaaatgttgtcttattagtcttgtataaatgttttaaatataacatgcatgcaattataaaggtctttaaaagtacgaacaatttaactcacttttgtttctggaagagtcctcagaatagtgtagacaaaagatgcccagcaaatacttaacaattatttgaacaaacacattgaatagaacttggagaatagaattggacaggaatttgaacataagaataaaatatatttattacattatccactgtaaaaaagcatagtacatattcacatacaaagtaacttttaaaatcataggcaagataagaatcagaagttgatacatgcaagtatattttaaaagctacaaatgcatacatgttttttaaatgtccttctactaaattcactttctataattaaaaaaaaatagccaaatcaggaggatagttactactactaattaaacttaaaaaaaatttcctaggtgttttgaaaatagttcctatgtaaattcacagtagatattccctactctaaacctacctcagtttgtacacccagcaccaaacaaatacaaagcattatgggataaaattaataatgctatgcaaataaaacaattcatttataaataataataaatagtcactccacatcacagtaacttagcatgattagagaataaatacttaactttgagaaggattactgactggcagtgtgttgctggtatatgtcaggattattcatcaccctgacagtaatattaaccacaatccatttcagttgcttcagtttatcattttctgactaatgttaaaaaacaatgtctttggaggctgcttgaattaagtgtagaattaacgtctgttagagtcattcaaaaacttctattagaagataacttctacagaaaaccaaatctgctatacagagtactaatgcttaaaagatgtaagtttcgaaacacagccatacaaaataaatggactaattctgttttaaaagcaaaacttcaacaaatcctgtaaatgccttataacatccatatacatatatattccttaaatatatatgcttccactttcctgaacttagtattaaattctacataaagagttgcacagacacattttaaactaacatgccacattgaacacgtaataattcaatttaaaaaggtcagtgtacccatgaaaaattttcttcagggttatataaattaaatagctacacagtttgctacctaggatcctcaaaattaagtaatctgctaaaggtctctctacttataaatggtaacaggaatatacaactctatctaaatccaaagattccctgctctggtctaattttatctttccaggctgttttctccacatcatgttgatattccttttagaagatatctgcatttataactcttctattaatttttatactgctctttcttgttttatgattattcactttccatagcataattttcttgttctattaatgcaatagtttccctttatctgaaaatatttattctagtttttttttttttaaaaaaacacttctgtttcataaattgcctctgtttcttctggttttgttttgattttctatttgctttggtctttgtcatctttcacattagaggttgtctttaaatgtttgctaatacttggctgcacctccatttttaagaatgagacactgaagagctgactgagcatatagaccataagtagtgatgtgaactggtagacttcactgaagggaaatcaagtgggctcgaagtagaatccctaaatgttttatttttttaggtgttttcttttgagccagtgaatatgtccaaagagtaatacaatcttctgtcttatggggtggggatggtataagcttagctgccgcagttctaatagcatgacagcagaaggggtctaggggctttcacgacttggtacttaaagctttcagttataatcctcctgttttccatcctttaccttaaaccctccttctggtgtgcttggtgttctcatatcagaaacgtgtctggtaaaatttctccaaaaaagtcaatctcttgctttttgacaatacagagggaagagtagttggattttggaatgaagcagatataaagcaagtattgaatttaaaatgttctttcagattatacctaaagtctaccagttgactgacagacagatttgagatcaaatcctgagcttaccacttggaaaatgtgtgacctcccagaattctttaacctcactaaatcttagtttccttatctgtaaaataaagacaataacacattccttacagggttattgaaggaattaaatgaaacagcatatgtaaaatgcctgtcatagtggaaagcacctattagggcttccctcacaatcctacaaatacgttgggaactctccccatatcatttttatgcttattagactgcaaactttccaaggccagacaatgtaatttatatcataatctctaaaatcaatgtggcatacaacagcatccatgtttgatgccaagattaaactattttaacatattatgtcagccaataaaacatatccaaaacataatcaagtatggggtaatttttagtttctttctctgcatttatattttatttaaacaatttaagatctattatttactgttgtagtatcataagatgtgtttcttttggtaagcttgaattcctttagcttcactgaagcccaataaatagaaaaatgaagtaaaagccataacacctaacaagtttaaacaatattccccccacccccaagagtgttcttttccctctgtgacatctagatggtatattgattcccagtgtatctgttacagagcagactaaaaggactggcattcatcagaaacagcacttaaaacttaaagagataaagaagtgctgtctgatcaacaacagttaaatgtcggtagtcaattccaggtcaagatgcatgctgtatattaaatgtgtgtgttaaacagaaatatctcacacataaaaatatacatccaaatggtaggagatacatgaaggagagaaaaaaaaatcacttacttttcctgaaagagagagcgagaaacagaaacatatactaagcacaaacaggagcaactcagcaatgaataacaaattcactatggttctgtcactcagttctcttcggttttgtcagaatctactctttagaactatttggatccaaactagggcaatgtaaactgctaggttaacagagtgtgaatagtctagcattgtaacataggtttaaaaacaaaacgaaacaaaacaaacatgatttcttagagcttagacaaaaatttaaaattcagttttagtcaattttcctctgattcctatgttgcaagataggaatcaggagatcatggtgcaggttcattttcttctactctttattttcctgtttctgcactatggaccaaaataacagctcattttgtggttacaatctaaagatgaaaaacagatttttctttaccttgttcctcaaactctctattttccttcattttaaaaatgtgagttgtaattattaaaaagtaagtatttgctttatcttggccattcctgtttctcccaaatcttcagcttattcttttactaggatagtaatgacttcattttattctttcacatcttcagaaactagcagtccatggcatattacagtactcaattaacaaccaataaatgaatgaacaaatgaataagcagtaacactggggatcctctagttttaaccgaacattcagctttttttgtaaaataggtttaatcaaaaaaggctggagcataacctgggataaagacaacaagagtagggcaatttgaaaagaaaaaaagctttcctttttcaagcaatagcatgctgcttgtaggtactaggtacttcagcatgagaagtgaaaggcaacttcataaataacattaaaacagaaccagcaactggtgccaaaagtggaaggcactattggcatattacagagtttctcaaactttctgggccaaagctcacgttaagaaatatgttactttaaaaaacacacatgtacatacactcaaacaaattgagcagaagatttatacaatatgcacagtgatggtttcttttttatgttatgctacggtatcccattcattttttaaaaacgcaattgtgagctacaggttgaaaacttagtgttcaaattctgattctacctacgtgcaacttgacctcatggtgcattagtttctgcctctgtaaaaaacaataatgttacctacttaaagggattttgtgaaggttaaaggaattaccacacacaaaacacttagacaaatgcctggcatatagtaaatgctcaataaatattagttaacaataataataaagtggatgatcctgtcttgtgaatttcatagccaagataattgggttttcattggcaagtggaatagttatcaattgcatttcaatccaagaacatgctggtttttttaaaaggtacccagattactatacaaatacatattatatattctaaaataactacactggtcaactagaagaaacatgattgcctcagattgtcttggtttccctctctcagaaaatctgttttacacaatcactttccaaagtaaagaaaaaataataaatcacaggtacaaaggaaatcatcctaatctacaaaggaagccctggtactgaaaaactcagccatcataatttacttttatggtatgacattttgtaaatatattcctgcgctgattataaattcttataaagaaatgtcaaaaagaaaatgttgaatcttatctcttccaaggaggttgtcaaaatataaaatcaatgtatgtttataaaatatggattaatgtcactccaaattctatgcatggttagatctgtcttctcatcagtcagaatttcagactactgatgaaataactgggaaagtagagggaaaagaaatcaacctcaaaattgattcctatttttttcagctttgaaagaataaattaaaccattttatgctaaatgaggacttttgcaatacaagaaaagatttaattttcaccagtctttcagaataaaatagatttgatcttctcaatgtacttatgatactaatttggaatgattataaagagatatattgtacatggaataaaagcttatacatttaaaaagacattttttacactgctccattcagactttttttttcttaaaagaagatcagaaaaataatacagaagaaaggatgctgattacattaattcagcttcagaaagagaattcccagtgcaacatggaagagattaccaaataaaattgtagctttgtatcaaaggtactaaaagtcctctgaaaaacagctttggcaaaattaaatagatataaatatgcataaataattcaatacattttaaagccagtcaggcaatattatccacttaagaacggagataagatctgtttgtattctacattaagctatgcatacaatgttttctaagatttcacaagtttatttaaacaaacagtaatgtttacaaaatgtatactatgggacaaattttaatacaattctattataatcattatttgtacagatagagctcatttatatatgagatgtattcttgaaaatgtgtgtataaacaaatatttgaaaactgaatcacactgtaaacattttggcaagccttaatactaaaaggaatgaggtacttttactaagtaaacaatcaccgctattttatatgtgcaaagtacaattttcaaatatctgatgtgcttgattatttcactaaatgcagttgattccaaactcacttatttcatcaatatttaatgaaagcaattagtactagtagaattccattctcatgaacctgaatgacttttgtagcattcacactaccattggtttataggaaaggagatattagttgtaaggcggtagaatgttagagctcctcacttctccccagacctactaattacactactgttcattattcaactgtgtgcccttcagttcttgttgaaagcactttttataactattccttcctcagccaaaagggcaaatatttcacaaaatttctaaaaatataaaaatgaatgccattacaattgaagtcacaaaattacacaaatgacatttcttatgtctttgtttagtggatgtggacatatttggatagaggttaatgaaagcaacagttttgttttgttttgcagcccccccttttttacttttaatgtagcaaaataaaaaagcaaaattactattgatcatctactggggcataaggtaaccttatttctcatatcctgaagaaaaggcattagttaaaataatattttacccacccaacaaaagtatttcacaagttccttaggtacagctgtaatatacaaataaaatttgattttaataaaggattctgtttagctggccactaatctacaatagcatttttctgatataatttcaatgaacattcataataaaaatcatacagcctacataataaaaatgtcctggaggcttccttctggtcatttaacatttttagtagaataggtaacaaagatgaggggcagagaatggaggcagttggtaaaaaagggtggtgttaggatgaggtaaaagggttatgagaacttttggtcaggtacaaagatggaggaagagaaaaacatatcctcaaaaaaaaaaaaataacctcccacttgtcaccattaggtactgtttcatcaagactgaatcatgagtccagcccgagtccagcccacaatccatcttagtactcatcacatcttaaagagatttctaaaaactcatctaaagcacaaaaaacatctgaataagctatgtgctgaaatagagtccaaactgtggattcagccctgaaacagaaggcaaggcaatacttctaggaccctagaacacgtattcatatatatgtcattcattttgtgaagcaaattttatattctaacaaaatcaaccccccaaaaatgatatttttacttttgcaaacacaaaattcaaaccatagagagagagtagggtataatagcctgaggattaaagagctgcccagtttttattattgacctactgcatggctcattacacaagtcaaactaatacagtcctcatttattagactacagagctctacagattccataatactatggggtcttagaacaaatatgataccgaggtgtaaggccttccttttcttttcaattttttttaaaccaaccatttatcattcctcatggtcaatgggtcaattgggaaattctgctgatctgggcctggctttgttgctcttagttggactccttcatacgtttgtggtcagctggcaggtcagctgaggactagcttgttaaggatgacctaagctgtcacagctcaagtgtcctccatgtgtcagtcacaacccatcagcaggttaacttgggaatgtttagggcatattctcaaagtgatcacagagaagcaagagcagaaacacacaagcactttttcaaattgtttctagtttgctaactttttttttcttgctggtttctcttttattaatggtggcaaaatatacataacataaacgtacagttcggtagtattaaatacattcacattgttgaacaatcatcaccactatccatcttgagaacttttttcaacttgcaatcctgaaactctatacctattacatgaaacactaactcctcattctctccctcaccccaggccctggcaaccagtattctactttttgtctctataaatttcacaactctaagtacctcatatgaatggaatcatacagtatttgcctttttgggactggcttatttcacctagcataacatcctcaagggttattcatgttgtagcatatgtcagagcttccttcctttttaaggctgaataatattacattgtatgtatataccatattttgtttacccatttatctgtcgatggacatttgggttgtttctatctcttagctgttgtgtgtcacgctgctacaaatatgaacatgggtgtaaaattatctgttcttatccctactttcaattctttttaattttttgagaaactaccatactgtttgacatataagctgcactatcatactttcgcaccagcatgcacaagggttccaattttccacatccgtgccaacacttgtgattttctgggtttgttttcattaacaatcttcctaatggttgtgaagtggtatcttattgtgattttgatttacatttccctaataattagtgatgttcattttcatctcattggccacttgtatatcctctttggagaaatgtctatcaggttctttacccatttttgaatgttgttgagttttaggagtctctacaaattcttgatattaatcccttattagacatgtgatccatgaataaggctttcctctgaaaattaaaactcccttttagagttcagtaagtagatatagaaactggtacaatttcttagctctaagcactatatcaggcacaagagatacagaaattaacaaaacaaaatctttgtattcaatgattttgcttaatagggaacacagagaagaaaatgttaaaattataataaattatgaaatgtattataacaagtatatggaaagtaccctgggagttcaaatttctagataaagaaaagagccaacagcaaaagcacaagaggtgaacatgaggcatcacaggatcagatgatacagcaaagatggggacagagacagaagacgtggtaataaaacagacaatggctagatcctaaacactattgtttgtcatgaggaaaatgttaaccttcgttttgacatcctcggtaactattgtgattgtctgaactgtgtgaagatcctatcctgtggatagagagtaggaattactcctgaacatcttcctggaatgagtaaataagagaacacactcttagagtccctgagctctaagtaaaggacactggatatgttgagtgaacttgtacttctcatgctgggatctgcagacactgggcaatgatcttctgactgagactgtgaatcactgagagccttgcatttctgctatgattgggtattcagtggagctttacataaacacttacctgtggcctaagatggatttagaagagttaagggaaatgactatgtatacccttgaaaaaagttagtactaacagcaagaaatctggtgttttgagaatgtaagagtgacatacaggaataaaggaccaacactgggtcagggtacagacagggaagaagcaacaaaaagtctccaggtcaaagatgtagaagacataaacatttgttagctgttcctagaaattactaaggaaagaagctttaggaaaaagactggatattccactcacctaaaaaatgagggtagagactttgtactcagacattaaaggaaatacaattctgaatataaattggaggaatcagtttgaactcataatgtatttcatcctaatttttttcctagcaccctctaaaaaagggatagaaataatgacaaattcagtagcaataagcagaatagacaaaactgtgatctccagatattaattcccactataagaggtcccacccgggctcctcaaagaaacagatgattctgtatctgggccagaaaatgtaagggttaagactagagtgcctggtcataccagagagcatgaaagttatcaaagactacaaacagtgtcaaaaatgtcccagtaataacttcaagaagctcccccggtcaaagaaagaacaactgaacatcagtaaataactgcaatggattgaaacatcaaatacattgaaatctatgagttcataaagatacttttttaatagtcagtttgataccattggagaatgctaggaatcaactcaatattttgaaaactgttatgtaaattaacagaaaagagaaagaattaaacttctatcctgtcttttctctgcaatgtaccactggataccccagtagtagaagagaggaagtgtctctttatagaatgagtcccataaataagtgaaataaaagtgatattttaaataccacaatttggcaatgcttactaaattaatgaatccatgcactgaatatcagtgctaacatcacaaaagagaagtagtgtttatcatgcacattaaatttttccatttgaaaatctgtttaagagataattatattaaaggtacgactatatttgaaaaaaatttttaagttaagtaaaataacgaaagacaatccaatttatttttatatgcaagacaattatatttcacatcattactgagaaattaccttggacaaatctctgaagttggtgggcaaggtaagatccagttcttctgattcataattagtgatgacccaaggaaacactggatactgatttaagtcattataactccgtcctgatagggaaaaaagttactcgtaatttataattttaaaagtgaaataaacagattcagtaatataatttactaaaaataagattaaacaatttttgattgccagacatcattctcagtatccatactttctctcatttaatcctcacaacaatcctatgaaattgtatcatctccatttcacagatgaaaaaattgagtcacaaaaggttaggtaacttgccccaaatcacacaactagtaatggtcaaaccatattgaaatccagattttctggtcctaagtttgtgttcttttaaactacatttgataattttttttatcacttgaaagcctgccccaaataaaatactcttttttttatgactttaaaaagctatttgtaattctcacagtttttcaaaacaagaatcctttctctgccattaataatcaaccaactaagcaatcaagtttaaatgacttaaccctggtggacattcaccagtcatctataaaatgagggcattgcactaaataattctgaaatgtctgtggtagttttcaaatcctataatcctctgaaaataatgagcagtattatcaatgttgcttccttacatgcccaaatgtggccacatgctcttctatacatctttctaatgacattttcaatgacatatttagatttattaaaaatacaaattacagcaaaagaggaggtagtccttctacatatgtacagcagttttttggatattacctttttagggaggtagcatagtgggtgagatcattgtttctggaatcaaaatgctggtgtttgaatcccagttcctatttactagtctatacatatttttagttagatttaacatgaacagacttttacggtgaacatagagacaagtatattaatattgtttgaattcctttcttattatatattctatcatttccattcctttttctttctcaaatatatactgatgttatatcaatacgtagctgaatattaaagtagttctctgtacatactcttggtatctaagccttttttaggtctgatgtttttaactttttattttactctattcatcttaggcttgaggcctattagggtaacagagttcatttttggctgacctggaacagtcttataaaacatcataacaatgacatttttaattcatagatcattaatgtcactacatatttctatcaataattttaatttctccattaaaaaaaccaaacatagcagcagaaaaaaaaattttatgctcccccacttccttctccttctgatttaaatgttggtaaacagtaaaatcgtcttgtcccatctacttaaataatcagaaataattttttattgtacctaaaaaatgaagagtatggacctgctcagtgattagacttaattaagttaaactcaatacacagttattgaatatcaactgatggccatttgggaaatgcatcatgatatcatgtttatctatatgtggcacaaataataatgtaaaagaaatcttaagtgagacttaactccatcctctaatgcacatttaaaaaatctaaagcaaatgatagattctatatttataaaacatatacagggaatatacttaaaggacactgcaggcacaataaaagctatttgagaacacatgatttcataaatgttgctccataatcataactgtgcattcaacatgggttaattgatttactacatgcaaaatatgtccattaaacttgttatataagtttcctctcactacttaaaaattcttttagtcactagttctataatttctactaaattcaacataaccattgacattttcttcatcccttttcctcagctgactgtgagataaacttctaataaaatttagaactttcaatgtgagcccctcaacttccaattctttgcaacatcccctcactctttcccatttctctaacagggtcttttctttgctaagagtaattgcttcacctgagctctcaaacctgtctccctcataacttgaattgttacttttcttctctcctcctcttacatcatttctcctctctgccccaacccatcttctctttaataacacatttaaaataaccataattggcagggcgtggtggctcacgcctgtaatcctagcactttgggaggtagaggcgggcagataacctgaggtcaggagttcaagaccagcctggccaacatggtgaaaccccgtctctactaaaaatacaaaaattagccgggtgtggtggcaggagcctaaaatcccagctacttgggaggctgaggcaggagaatcgcttgaacctgggaggcggaggttgcagtgagccgagatcgtgccattgcactccagcctggggaagaggagagcaactccgtctcaaaaaaataaaaaagacctgtaattacatctacagttactatttcatttccaaccattcattctgaagtctccctctccactctgtaacatttgacacaggtgaaaatgccttcctccctctttcaccttgcctctcaagacatctgacttacctcagttctcctactatatctgcacattctaggatcactcattcctttttgtcctttactaactttccttctctcttctcatatgcaagagaatttccctgtcttatctcactgctttctgtattatcttccttgctgatctcacatctcttggtgatttcctctctatgcagatgaaatccaatgtcctagttctaagttccgaatatcctccttgacctatacttccaaaaactctgataccttaactagaaagtctgccggcacagtaaaatcatcatctttccctagatcaaattttctgacttctttttccattaattgcaccaccattttcccactaacgcaggccagaagcctggaagtcttttcagatactttcttctcatttaccacctacattcagtcagctgcatatcaaatggttggtgccttgtgaattcttatagaatttgttccttcttttttaattcccactgatacctaatggaagccctcattactacacacacacacacacacacacacacacacacacaccacacactaaattacttcctaactttactttctgcctagtctctagccacccaaatttatcttacacacacagcctccaagttaatttttgatgcagctctaatatcacttaggtgctcaaaaactttcaaaagtttcccaatgaactgacgctaactcttcaaactgacaagaaaatcgttcttcgcatttctaacattcttattttttcccattatatctttatgaatatatacttcatgcacacaaaaatatacagtatatacatagatatacaaactataccattcttgctctctaggtatactttatattttcccatctttgtatgtttgcttatgctttcagtcttacatggaatgacatctaacattccaaccacctcctctgctagtcaaatagtatccatccttatacaaccattgaaaccttattttctccttactcccaccaactgggtgaatataatttccctctctccctgtccttttaatcaccacagtactttgagttttttactgaatctatatccccttgctctagaatcatgtaaacattcacatttgtacttaaaatgacttctatgagagtaagcaacataccttattctctttgtatatcctttgtagtattctagtagcaataacggcaataaaacaagctagttataccactacttaaaataatctaacaattgaaattaataatttattgtctaaaataaatcaatacatggaattaggttacctgctatcgtgttgagaaacatcaagtactcaaaattagatatctctctgtgttgccatcgctgggtcatattagaagccttaaaaagctgacgtggactagctaatgaaatacgtctgcaagaaaaagaattcaatgtgatatgattaattatatcacaataataaatcatgaattatctgtgcttattcattcataatatctataattctgaaaagttctattcatgttagactaatgaatactagagaggtttcaatctacaattcatggttaaacaaatgatttagactagccacagaggtattatacatgttgtattcattcaggtaagctgtcattacagtgccattataatgtacaggttcaataaaagttgattaataacagtataattaataattcactgctttaatgatataaaaagaagaaattatagcagctgggaagtgcatataaaattctattcacatgtctttattaattgtaatagttatcttaaatgaacacatttttacattataaatttaaatatatttgcatacactttgtatcaaagagaagggagactctaaactatttgggcgtctgttcatggggtaaagagaaatttttttaatatagcttaatagaagacaaattttcctgtagcctcctaatgaaatgtaaacatcagtgaatagaactgatcaatacaaagagtagtgagaaacagatggcagaattagttattacattcaaagcctagaatctcagagaaataggctgtcacagttctttctaccacaaaaaacaaggtaattattttgtaaaaggttcactgaagtataattttcatgccataaaatttattcaatttgtacaattcagtaatttttaaaaaatatttcaaaagttgtgcaattatcacaattcactttagaacattttcttcatctcttctcggccttttggctaaaatcaagtgtagaacattttcatcactacaaaaatttgccttgtacctatttacagataatcttcattcctatccccacctacaggcaactagcaatctactctgtgtctctagtaaacccaccttttctagacatttcagatcaatggaatcatacattagtatgtagtcttttgtgtcaggtttctttcactaaacataatgtctttgaggtttatcaatatggtagcatgtatccacagttcattcctttttattgctgactagtatcccactgtatatagaatacagcacattttgtttatctagttgatggacatttaacagtttttgctattataaataatgctaccataaacattcatgtatatatctttatatgaaaatatgttttgatttcttttgggtagattcctaagagtggaattgctaggttgtatgttgagtttatctttaattttttgagaaaccgccaaattgttttccaaggtggctataccactatatgttccaatcaataatgtatacattcatctccacatccttgccaatacttgctcttgtgtgtattttgattattaccattctagttagtgtaaaataacagttttaatgtatgttgttgagcatcttttcatgtgctgattggtcatttgtatatcttcttcggtgaaatgactaatcaaatcttttactcatttattgagctgtttgcattttatcactgagttgttagaattctatatacattctgaatacaactctgtgatagttaattttatgtgtcagcttgactggattaagtgaccttagagagctggtaaaacatgatttctgggtatatctgtgatggcatttccagagagattagtacttgaaccagtgggcttagtaatgcggactgctctctccagtatggtgagcatcatccagtcaattgaggactgaatacaatgagaaggagaaagggtgaattccctcttctgctcaagctgggaatctatattctcctcctcttggatagcaggagctcttggttctctgtccttcacttcttaccccatccctctctccttaggccttcaagccttgggctcagtcatgggctcccctggccttcaaattaggattgaattacaccactggctttcctgggtctccagctgtagatggtgtattgtgggatttctcagcctccatggtcatatgagccaattcccataataaatctcctcttacatatctatacatatcctattggttttgtttctctgaagaatgcagactaataaaaagtgctttatcagacacatgatatacaaatgttgtatcagtctgtggcttatttcttcatttacttagtggtcaattttgaaacacaaaagttttacatgttggttgagtccaatttctcaattttttcttctgtggattatgcttttagtgtcacatctgagaactgtttgcctttcccaacatcagaaagtttttctcctatgttttctttctgacattttatagttttacttctcacatataggcctataatatattttgagttaatttttttgactggtatgtggtaagcatcaaaattttcttgtatgtaaacatccaattttgtccaccaattgtttaaagcctatcttttcctcactgaattgtgttggcacctttgctgcaaaacaattgaccgcaaactcaaggatttatttctgtattgtcaattctcttcctttaatttatatgccgatctttgtacaattaccacaattgaagactgagtacaatgaaaatgaggaagggtgaattccctcagtattttgataactgtggctctacaataagttttgaaatcaaggtacatcttccaattttgttcttatatttcaaaattgtttcagctactctaggtccattgcatttcaacttcccaatttctccaaaaacgtctatcaggaattgatagggattatacagaatttacagatctagggaaaactaccctattaattatattgaatcttctgatccatgaacatggaatgtctccatttattaaggtctatttttaatttctcttaaaaatgttttatacttttcattgtacaaatcttacacttctgtgatctgtaaagagggctactttctttcttcattcccagtgcagatatctttaatttctcccttccttcctctctttcttccttattgcacaaactaacatctccagtgtaacgctgaatagaagtggtaaaaatgggaggacatttttaccctcctaaacttagggggaaagtattcagtctttcaacattaagtatgatgtacgtattgggagttttttggtagatgatttttgtcactttgtggaaatttctttagttgaaagttacttgagagtttttaatcatgaatgtgtgttgaatttggtcaaatgcttttttctgaaatgatagtaagctttttctcctttataaatactggtgcatgacataaattgattttcatatttaaattaactggcattccagtgataaaacccacatgaacattttataaatcctttttatatactgctgaatttgtttcctaaattttgttttaaaaaaatgtgtctgtgttcaggacggaaattggcctatagcatttttcttgttagttttcctgtaatgtctttgtctggcagtggtattgaggtgactgaccttatagaatgagttgcaagtgtttcctccctcctatcttctggatgagtatgtgaaagatttatatcatttctagtttaaatattttattgcattagccaggaaagacaactgggtctgggcttttctttatggaaagatttttaaattaatagctcattttatttatgtgttataggtctattcaaatttccaatttctttttgagccagttttggcaattctgtttttctaagaatttgtccgtatcatttaagtatctaatttgttggtaggaagttgttcatgatattcctttctactccttttaatttctgtaggctcaggctgggcttggtggttcacacctgtaatcccagcactttagaaggctaaggagggaggatcacttgagcccaagttcgaggccagcctgagcaacataggaagaccctatctctataaaaaaaaaaaaaaatcaaaatattagccagacatggtggcatgtgcctgtagtctcagctactcaggaggctgagatgggagggtggcttgagcccaggagtttgaagctgcagtgagctataactgtgccaagtgcactccagccagggcaacagagcaagatcgtgtctctacaaaaaaaaaaaagaaaaataaacaggaaaaaagattctatatgctcaatagtcatgtctctactttcacttctaatttaagtaatttgtgtcatctttcatggttaggttaaagtctgtcaattttactgatctttgcaaagaatcaacttttgtttcattgatcttcttcagtgtttttgctttatgtttcattgatttttgttataatcttcattactctatttttctacttgctttgcatttagtttgctctcctctactgtctaacagtagaagcataggttattgatttgaggaatttatttcagatatgggtgtttaaagctgtaaattttcacttaatactactttagctgcatctcatatattttgatatgttatacctctgttggatataagcatccaaattagtatgcttctcagtcccatgggaggaagagttgctggccacagaagtaaccaaagcactaatagctacatggcagagacatggcagaatgtgtgaggacaaaaagaaagatgcccccaaacccaggcactctctaggttctgggaggtatacagaggaggaagtggtgcagaccaaggagcatggaatcaaaaaaaatgaagccccctacaccaccaccactctagccacacagcctaagctcactcccttctctgtacctctctaagcttctaactgcaaaataacatatctcctggtagctgttataacccctgatatgcatgtattaaactccttggttagtgctcctatagaaaaaaggaaatgcctgaaaacaagtgatagggttaggcaaaacttgcagtgaaacagaaaaactaaaatgaaaactattgttggtggcatctttgggctgactcaatatatttttgttacggcttaaaactggtatctgtgtgtatatgcttgtactgtaagagctcctgggtgtcagaaagaatattccagatcaagaaccaccacaggtagaaaactgataacaggactaattctcttgctgattgccatcagtggtgagtcaggatttagcacaatagtccctaccctctcacgtcctactggctgacaagtcagaacatttggtcttaatggccctgacttgtagtgttctcacaactaaaccaaaaggagtagctcataaatgccaacaaaattcagggtcctgcttgccaagtaaagcttcttgatattgtgtgggcaaattcacaacattcaatcctctggaggtcaaaagctaaatgtgatggacagttttcagtctatgtcttactgatttctcatcagatattttcatgtttaaaaactaccatcccttggtgatatggtttggatttgtgtccccacccaaatatcatgtcaaattgtgtattagtccactctcacactgctataaagaacagcctaagacggggtaatttactaagaaaagaagtttaattgacttatagttccacatggctggagaggcctcaggaaactacaatcatggtggaaggcaaagaaggaagcaccttcttcacaaggcagcagtgggggtgggagaaccaagaaaaaattaaaccatcagatctcatgagaactcactcactatcatgagaacaacatgggggaaactgcctccatgatccaatcaggtcctctgttgacatgtggggattataatttgagatgagatttgggtggggacacagagaaaaaccatatcaaattgtaacccccagtgttggaggtggggcctggtgggaggtgattatatcatggggtaaatttcccccttgctgttctcatgacagtgagtgagttttcacaagatctggttgttgaagagtgtgtgacaacccccctccccgcttcttcctcatgctcctgccatataagatatgtctgcttccccttcaccttctaccatgattgtaagtttcctgaagcctctccagccatgcttccttatagcctgaggaaacatgagccaatgaaaccccctttctttataaattaccccgtttcaggtatttctttatagaggtaccagaaaagactaatacacttggcatcatattttcctggatttcctgtcttttgagccactcctgtttttgctcttagtgttgttgtttttgggagggcagggatgtcctgtttcccttacctaacctttacatgttgaggttttctggatgtagctctagttcctcttggcattttacaatctctccccagatgaactcattccctctcatggcttcaaatttcatctacttggtagtcattctcaattactaggcctttcttttgagctctcaacatacctccttatatctagcttcctattcaacatttcaatctggatgtctctcaggggttctaatttcaaggacctaaaattaaactcattttctgtccctccacctcctccacacaaccccagccatggggatggaaggatgtttatacaaatactgttcgtccattattcctaatcccagtaaatgccactgagcagctcaagctgagacttgagtattgactaaagatattgaatatctccccttgtcatcaccccccaaatctctgagtcttataaattatatttcttaaaaatctctaaacaagaatgtctctcttcagctacattatcaacatcacatatcatccagatgtcttcaataggctccggtcttatataaataacaccctcttcctaatatcactaagttccagtgatacttgctttccaacatttcttagaacactagaagctccctgccttgcttcagggcctttgcatatactgtgccttcgttcaaagaatagctggttatatttcttcaaatcaaaacttaaaagtcacataggaagatattcctggttatcttatccaaagcaacccatctctactctactaatcactactacaacactctaattatatccttcctgtcacttatcacagctatttagtttacatatttgttttaaaaatgtatgggtaaaatggtttctatcttgtacatggctgagtgcttgacacattgtaagtgaaaatctatttaagaaactgattaataaattaagacttataggctgggcacagtggctcatgcctataatcccagcactttaggaggctgaggtggcaggatcacttcagcccaggactttgagatcagcctggacaatggagcaagacagcatctcttaaaaaaaaaaattagccaggcgtggtatcatgtgcctacagtcccagctaccgggaagctgaggtgagtgattcgcttgagcccagcagattgagctgccgtgattgtaccactgcactccagcactccagcctgggtgacatagcaagaccctgcctttaaaaaaaaaggacatctagctttaactgtgggagaacattacagaacattcccaggtatgaaaacatatactaggtgtgataaacaaaacttttctaaaataaagagataatttgtagaaaaagacttcttaactaatataaggaaatccactatgctcctctgggctgcttcttcctgaactctgaaatcctcattaaattataaaaattatctaatcaaaagcattaccggtattgtaaggcaacatagcttataatccagaaggaccactttatttgccccatttacataaaagttgtgacctgtggtagttctggaatacatcctcgagaggtggagcttaattcccctcccctggactttgggctgtatttagtgacccacttgtaaatgaatacaatgtagcagaaatgatggtgtataactatcaagagaaagtaatttttaaaaattggggtttctgcttcattctctcttggatcacttgctctgcaggaagccagctcccatgtcatgtaacactccagtaacagatggaaaaactgactcggtaaggaactgaggcctactgctaaggagcacatgagagattcctttgacagccatccagccacaggctggctgtagctactactaacatcctagctgatgtttgtgcattctatcgcaattgcatttgtaataggatacttaaaatttaaaaataaacactgatcaaaagtagctcaattcaataccaaattaggtatgctaaaagtaaactgtacgtttccaccacgaatatgtttcaatcaatagaaaaatcccagtgttcgctctttccagttcttaaattagttaactaaattgtattgatgatgaatcaatacctactatgaaaggaaataatcagtaattatgctacttcaatgtagtcccagcatacaggagaaagatgcatacacctacactctcccaataccctataccatgagagatattttgccattttaacatttctctcagagacttattaggttactttcaactatataaatacttgttattaagtccatacattcaaatacaaaactaatatgtgaattctgatttaccagaggctacacatacaggttttaattaaatatagttacaaaatccttaatctatagatttaatatttatattaaataaaaaattgtatgatgtaatagagcaaaatccaatcatttttatcaaaacgatgaaaagtttcagatttatcatgtgtatattaaataatgctatagcacatactaaaatgattgtaataaacacttttttaaaacagcatcacatgtacagatgtaataagcacttttggcttagatatttttaaatatgcttagaaagcttatctttcaataattgtgattggaatataattaattttttatatttatttaaacagttttacatagatgtaataattgtacatatttatggtgtacgcagtgatgtgatatacataagacatagtgatcagatcaggtaattaggacacccattatctaaaacatttatcatttacttgtgttagcaacagtcaaaatcctcctcctagctatttgaaactgtattactgctaactctagtcatcctacagtgttatatagaactttagaatttattcctcagtccagctcttattttgtatactttaacaaatctctccctatcatctctccctccccactacccttttgatcctcgagtatccactgttctactttttactcatatggagattaaccttttggtagcttccacatatgagtgagaacacgcagtgtttaactttctgtgcctggcttatttcacttaatataatgtcctgcagttccatccatgctgccaccaatgacaagattccatgtttttttatggctgaatagtattccattgtgtatatatggcaccttttccttatccacttatctgttgctgaacaccactgattccatctctttgctagtgtgaacagtcctgcaataaacatggtgggtgcagatgtctcttcaatgtactgatatcctttcgtgtggatagatgcccagtagtgggaactctggatcacatgggagcactatttgtggtttcttgaggaagagatataatttaatacattatattaaatgtataatatttatcaaacttaagtgtacaatttgatgagatttgaatatatatatatgtttctgtaaccaccaccacaaccaagatacactctaaaaggtccctcataaccctctgcagctaattcccttgccccaactcttggcccctggtaaccaataatctgctttctgtcattgtgtagttttgctttttcagtaatttcatataaataaaaccatggcctatggctatgatgtatggagcccgtaatgtttaatttctttcatttagcataacacttttgaaattcatccatgttgttgcatgtaccagtagtcatttcccttttatttctgagtggtatttcatttattccagtgaatacaggtattgcaatctgtttagccactcacagttgatggacatcagaaatgtttacaatttgagactggaataaaactgctattaatatttgcttaaaagtaaatgtgaatatgtatgttttcattactcttgataaatgcctaagagtggaattagtatgatatacattaagttcctaacctatacatcctcattaactttacacattctttgttgttgtttttgaaaatcaagtttgttgaagaataatttacatagagaaaaattcattatttttaggtgtacaatataatgagttttctaaacatagaggcttatgtaagaacaattatgacatggaatatttccatgatccccaaaagttccttttattctcccttgtatgcaattcttcctcttttcccatagctcctagcaatcattgctctgttttctgtccctaacagctatgctttttccagaatgtcatataaatggaatcatacaacatgcagccttttgttttggctttgtacacctagtataatattttcaaattcatctgtgttgttgcatgtattagtgcttcactcctttttattactaagtactatatagattccattgtatggatttatcacagtttgtccatttaccagttgataaccatcttggttatttccaatttttgtgatgaatatggctgctataaatattcatgaagcagtcattgcatgaacatatattttcattcctctagggtaagagacctagagtgagactcctaggatgtatgggaaagtgtatggttaattctatatgaaagtgccaaattgtttacaaagaagtcgtaccactttacttccccatcaacaacatgtgaggttccagttgccttgtatactgctcttggtattgttagatttttaaaaagttattcgaataggtatgtcatgggatcacactgttgttttaatcagcatttctcagatgactaatgatgtttggcatcttttcatgtgtttattcggtatctatatctattctttgttgaagtatctgttcaaaacttacattttttttttgtagcaagcttatcttgttatatagtatgtttcctacatatcctggatgtaagtgctttatcacacataagttgaacaaatactttaatccagtctggcgtatattttcattttcttaagagttggcatttcaaagcaaatgttttttattttaatgaaatcaattaaagatctaaagaaatatttacctaattcaaggtcacaaagatttttctcctatgtgttctttcaagaagttctacttttagcacttacgtttgtctacactacgtttttttctgttacattttgagttaatttatatgtaaaattaaggggtgaggttctttttctttttggatatggataaccaattgttcatcatcatttgttaaaaagatcattttcccccctgggcataccttgacatctttgtcaaaaatcaaattgatcatatatgtttgagtctatttctggactctgttacagtccattggtttatatgagtctatccttaaataacaagctatcctaatgaatgtaattttatattaagtcttttgtttttttttctcaaaattgtttaaactattctggatatttacaatttcacttaaattttagaatcagcttgtctatttctcttttttcctttttttaagttaaaaaaatagagatggggtctccctatgttgcccagactggtcttgaactcctaggctcaagtgattctcccacatggactttccaaagtgctgagattacaggtgtgagccaccatgcctggccatcttgccaatttctttaaaaaagaaagaaagaaagaaaaagcctgctcagattttggatagagctgctttggacctcagatcaattctggagaaaactgacatcttaataatattgagtcttccaatccatgagcgtagtatagtacaattctccatttttaagttttaattctccaaaacagttttatagctttcagtgagtaggtcttataaatacattttcaaatttatctatatgtatttattttttgatagtatttaaacactagttttaatttcaatttctgattgttcattgctagcatacagggataaaattgagttttatatactgacccagtatgctatgaacagctaaactcatttattagttctaacagttgttgttgttgctgtttttttcctcatagattccctgggactttccacataaacattcaagaaggtatgctaaaatgactattttatttcttcctttccaatcaggatgtctgcagttcctatttcttgaaaggcctttgtatgcatttggtgttcaggtaatgctggtctcatataatgtttttggcaatttaacctccttttctattttttgcaagagtttgtgtagaaatggtattatttcttcattaaacatttgatagaattcatctgaactacaagttttctctgaggtaaggtcttttactacaattcaatttcctttgtagaactattaagattaaccatttcttcattagtgatatttgatagcttgtgcctttcaagaaatctatttcatctaagttgtctaatttagtagcataaatttgttcataatatttctttatttttcttttaatatctgtagtgatgttccctcccttattcttaatatttttaatttgtgtcttctctttctgcatctttgctagatatttactattaatacatttattaatcttgtcaagagacagcttttcattacactgatttttttctctatcatttatttttattatttttttctttcttcagcttactttgactacatgtgcttctcttttttcccacattcttcagattgaagctaagatcattgattttaggcaatgatcctctcctcctcccctcccccttaccctctcccttcttaaataaaatcatttaatgctataattctacattaggcacttctttatcttcatgttaaacatttctataggttgtgctgttattttcaattagtagaatatttctaatatctcttctaatttcatctttggcccatgttttatgtagaagcgcattaatttccaaatctcaagagattttccaaaaacctttctgtaactgatttctggtttgtaattaaccagagatccaagatctcaatctttctaaacattttgagacttattttagggctgaatatggtcaacgtgataaatgttctacgtgtatttaaaatgaatgtattttgtgcaattgactaaaatgttttatacatgtgacacagatcaaggtggttaataatgttccagtcttcagtatgcttactgattttttgtctacctgttctctaaattactgacataacagggagaggctgtctatatttcattccacttctatccacttttgtcttatgaattttgaagctctatttttagatgtatgtaaatttaagatcatcaccttgatgaactggctcttttatcattatgatatgtcactttttcctctgataatataatgctttgtgtggtaatttgataattgttatgggttgacttatgactccttaaaagctatatattgaagagctacctcccagtacctcagaatgtaacaatttgcagagagaatattttcaagttaaaatgaagtcatcagggtgggcccaagtccaatatggctggtgtctttgtaaaagagggaaacctggacacagagacatacacagggggaaaacaatgtgaagagacagagggagaagagaggcatctaaaaaccaaggagaccggcctggaacagatccttccctcatagccctcagaaggaaccaacactgatgaaaacttgattttgaacttcttgcctccaaaactgtgagacaacacatttctgttgtttaagccacccaatttgtggtactttgttatgacagccctagaaaactaatatagtaatgatatgactagctggctgtttttattaaggtagtgtttgcatggtatacctttttctgtccatttacctttaacgtataaatgtatttatatttaaatggggcttcttggttgccagaggcagaggagtgggggaaatggggagatgtggccaaagtgtacaaacttttcattgtaagacaagtaagttctgggaatctaatgtttaatatgaagattatagttcataatattaaattgcatatttaaattgctaagagagtagatcttaagtattctcaccacagacacacacacaaaggtaactgtgagggatggatatgttaattaacttgaatgcagtaatcatttaacaatgtatatatgtatcaaatcatcatgaggtagaccttaaatatgtgtaatttatatttgtgaattacaactcaataaagctggaaaaaaatacctactgcaaaagaaaaaaaagggtgggtttcctctaggtagcacataaatgagtattgcttttttatgcaatttggttttttcttcctttaaattatatagtttaggcaaatagtacttcaaggtagcatattttttattatattattttataaataagacattggtcataaaacttgaaagaaaaaatacataaataattttaccacagcattttttataataatgaaaacatggaaataaagcaaatcttcagcaatgagggaattactcaattttgatatattcatatttcagactattagcaaccaataaaaattatcatttttttgtcttgtatacatcacgaaatagctaatttgagcaaattaatatatccattacctcatatattcatcattttttgtaatctagtctccacaatttttaagaaaacaatatgctgttactaactatagtcactatgctgtaagatagatctcttcaactattcctcctaactaaaattttgtatcctttgaccaacatctccccagtcaccccacccctaacctctacccttggtaaccacgattctactctctacttctatgagtctaacttttttagatttcacatatttagatcatacagtatttgcctttctgcgtctttcttatttcacttaacagaatgtcctccagttcatccatgttattgtagataacaagatttccttctttttaaagactgagtagcattccattgcatatatatacaaccaaaatttctttattcatcagctgatgtacacttacgttgatttctgtatcttggctattgggagtaatgctgcaatgcaaacaggagtgcagatatctctttgacatactgttttcatttcagttagatatatacccagtagtgggattgcaggatcatgtggtatttctggttatacgtgtgtgtaccattatgatatatatcgtgtgtgtgtatatttatacacacatataccattatgatatatattatatatatatgtatctttgaaaagaatagtaattatatcgatatatatactataaatatctttcctaaaaggttagtatttaaactttccataaaagagataaaaagtaaatcttacaatatacacttttcttggggtaaggttaggcaatcttttatttaatgattatttgctaagtatatactctgctagacaccataccctatgctagggaaaacagtatattataatgcagtttagtcaaaagaaaacttaataacttaaaacagtacattataatgcagtttagtcaaaagaaaatactaataatcattatttactatgaaacataaaacagaaagttataaatttcaaaataagtgagaacattaatacagattaatgttaataagaatattaatactggttaattattataactattaagacactttactttccctaagtttctcatataaaacagtacctggtttgaggcaatccaaaacttgttccaacgccaacacgaggtagatagttaaccactttctttactgttgcagggtctgggaagttgaacatcacagcaactacaacagatgatttttaaaaattagaacacagtataacttcctttctggaaaactgactccttggtccaataaaatatttacttttaattcaggtatctattaaatacaattcttactatattccttttatatagtatatatcaagttttagtattaatatgccagtgataatattcatttcacttataaattcttttaccatagacagtgctttcctaaatactattaggtgttataacagttgatgttgcattgatatgacatgaagttgagattatgagacatgataataataatgataatgatagctgagataatgtgacatgaagctgcaactttaaatttacaaaaatgaattttggcaagtcaaaggtatttctaggagtttccagaaacaaatattaaaaatttaagtttatgtagttaaacaactaacactaaaaaacaaccaatatagctatgaaataatcagttacatttatttccaatcattaagttttaaaacagtctttttacaatgtctatatgtttatctttcatatgttcaaatgagcaaatgttcatataatccaaaacaatgtgtgatctgaaggaacatttttcctctgcagttaaaaatcaaatttaaatgctttctcatcctatttcaataatttcacatacatgagaataccaagaagtacatgtcaatatgtaaacatatttagcaataaatgttaatttatgagagtaatctataaatttttacccatttaaagaacatgaaagtaaaatcatacaatcttgagagagtttagaagatattcatttggtcagtcatggaattttaacttcaatgtcagaatcatatgtaagctacaagcgatcatctagaagatggtccttcttctctaccaacccttaaaaaaatatttaaagccaaaaaaaaaatataccaatgttcctatagtttttaaaacactggcattgccaacatgtttcaggtattcaggtaaataagtaatcgatcattcactaagcacctataacatatttagtaatgtcataatatatacacacacataagaatatatacacacacataagaatatatacacacacgagaatatatataacatataatatattatatataagaatatataacatataatatatataagaatatataatatattatatataagaatatatattatatataatatattatatataagaatatataatatattatatataatattatataagaatatacaatatattatatatcatatataatatataagaatatataatatataatatatcagaatatataatatattatatataagtatataatatattatatataagtatatattatatatacgaatatataatatattatatatacgaatatataatatattatatataagaatatataatatattatatataagaatatataatatattatatataagaatatataaaatatattacatataagaatataaaatatattacatataagaatataaaatatattacatataagaatataaaatatattatatataagaatataaaatatattacatataagaatatataatatattatatataagaatataaaatatattatatataagaatatataatatattatatataagaatatataatatataagaatacataatatatattatatataagaatacataatatatattatatataagaatatataatatattatataagaatatataatatataatatataagaatatataatatataagaatatataatatataatattatatataagaatatatattatatataagaatatattatatattatatattatatataagaatatataatatataataattatacataggaatatattatacatatatattcttatctgtgtgtgtgtatgtatcctttagataagcctcctttacatatccactattatactgaattcagggggaaaaaataaacagaagaaaaaaatcatcataggttatggcagatggtcaaggccacgaggcaaaggcaacagaaaaacacacatataaaaacaagcatgcataagaaatttcaaagaaagaaaatgaatgaggatgagcaagtaataaatattctaagattgaagctcctttgggacagcaaggatgcggactgaaataaagtgtgaaacattctcttgattatttgcctagaagaataatgtttagattagaagaagaggtatgtgccaggaggagatcaaacaggaagggaaaaatcttttcctaaagaaatttgtattccctaaagacagataatttcataaaggaaaaacaagatgtgtgtgtggaatataggcagttatgtgtacctttaaaaataagaaaccatcaacccatgtatatataatacaaggaatatgtacaataaatcagtaggttttacatatattccattgtacacctccacccataccaaatgatgcttttccttcaagttcaacttgtctccccttcttttcttaatggatttcaccaagttccatcgtaaaactgcaaattaaattttagttcaactttcaagaatgatgaaatacagagcaaacaggacagttcagtatcattttctcatggttcctttataaaagcaatatatcacatatatcacacaaaagattaaatagacatatgaatcgttattgtcctctcctctccccaaatgcagccaccttccagaaggaattaagtatcaaagcaatgctcaggacatcaaaactcctcttcaagctgattaaatggttatgtattccttatgtttataaagccttatatcaatttgtgatatggcaaaaaaaagaaaagaattacaaatgattctattaataatcaaggtgggaaaaaaccatgaagaagcatttggtacaaaaaaagaggtcactagaacagaaggtgggctacaaataactatctaaattgaagcaatatggtatgttcaaaaatgaaatcttaaagagatggaagttagctctgtaacaacgtatttctgtaacacattacctctgtttgccataaagatctccagggctgtattttgcaaaagataacgacgagaaaagattgatcgtatctctgtgaacagccattttccatgcagcccttctgtatatgccaagatctaatgaggaaaaaaataatcccaggtaagtaacaatacttgttttttgttgttgtttctttccccaattaaaatagaaaagaccctattaagaaaaataatttttaagaaaaaggatttaatagttacagacataatttggagatgaagaaaataaattgtaatttatagaaaagaagcttaaattaaaaagcaaagtaaaattataaaacatttaagtatatattcgggcttttaaaaacaatgatataatctactgcttctgaagaaatacatattgcatcatttactgattgatttttaaaccacattatgaaaagtaaaacttcagataaaatcttaaaaacaaaaagccctcaaaagaatgtcatatatgcttataaatcacatacacaattcagtttcacatgattataatttgcccaataatgcttttacatacattataatacaaatatattaagttcataactttaaaaaatgacacttttaaggtcactgttaaggcaacagtcactcattcagaaagcacaaacactgactatataagaggttaagtatcattttgtcagctaaagctaaacacaaacctgcaaatgaacttagcataatctccctatggggtaggtggttgtcagagtaacttgttacaattcttgtcatcccaggtgacagacagagttgcttaaaatgctttgccaattcaaagtaatcctgtctttagtcctaacccactttgttgctttgattcaagttttgtttttcaaaacgttcatttcaaaagcttaattgtgaaagcgttaagggaaaaccagactcagcatttctctacaccagtactatacataatacataagaaaatgagatgcacttgctatcaaaacctgatattctatgacagcaaattaagtttaaaaaattaagaaatatatctcaaaagtaaccactattaaaaattacaaatgaaacatttgattatgatactacattgtaggaataaagatgggatgagcaaagaggtaaaataacgagtagtaaaaatttatccttctcaaactgttttgtctttactcatttttattttcaaaatcctaatggcaaataaatctacattctccagtgcagaatgtagtttttttgaaaaaaaaaaaaaagagtaacaaaccttatttaagtcagtaagtatgtatttcagtctttctacaaaaatgattctatttctgacaccacagaatctagaaatagaatgggtataactctaagggagagtgtttcttgaaaatacaaaacaaaaagttcaaaagacaagataatcatgcgtgcagttttgaaatggatgagagagaaatcctactaattcagtaatataatcaacgcctatgtaaaataaaggtaaatgaacaggaaacgagaggacaaaaatatgaacattactctcagagattgcatgtatccctttctctcactttgaccagagataccaccagttggtctatggccccaaggtcttcagaggcatctatttgttctctcttttattcttacctctgaagtctaccatgaccagaggacccttcacctcaaaattttaaaatacaaatcagatcacatcattcctatatttaatagtatccagtgacttcccatgacatgtataataaactcttaagctctttatgactgcataaagcctcatatctgggactgtcagatgagttcaactcattcttcctcagggctttgttttgcccttgttttccactctgcctggaatgttctcccacatctccacatggttcactcattctcacatttagacttctcctcttatgtcacctctgcagggaagccacaggatctaaaccccagttactccattaacaactcatcccaccccaaacttaccagattttcttcataatacttatcactacctgaaattttaaatattaatttaattttcaagacagggtcttactctgtcacccaggctggagtgaagtggtgtgatcacagctcactgcagcctcaaccccctaggctcacatgatcctcccatctcggcctcttgagtagctgggactacaagcacgtgccaccacatctagctaacttttaacaatttttttgtagagatgaggtctcactatgttccccagggtggtcttgaactcctgggctcaagtgatcctcctgcctcagcctcccaaagtgctgggattataggcatgggccactacacctggccactaactcaaactataatatttgcttgctagcctattgcctcttcagcactagaatactagaatctaagttctgttggagcaaaggctttgaatataccctacttccaatgcctagaaaaatacctggcacaaagtagcaattttcagaatgactaaatgaatcaatgtatggcaaccttcagtccatatttgatccgcatgatattttaacaaaatttcacatggttgaaaatagttgagaaaacagatattcgcaaaaatattcggatttctgtcttctcaagaaaaactagggtatccagcaaacctggatctgtatgccacatggtaacaattggcatgcactctccattttggtaccattttcacttcatttattattattcactaatgtgatgtgagcattcactcatttactattatccacctagtttccattggtacttgagtttgctaccctggatttaccaaatattagagaatccaatatatgttctgcaacatttatagtccaatgtatccataagaaaaacaagagccagggccagtagcttacactggtaattgctgagctttgggaggccaagatgggaggactgcttgatgccaggcaacatagcaagacctcatctctacaaaaaattaaataattagttgggcgtggtagcatgcacctatagccctagctactcatgaagctgagatgggaacatcactcaagcccaggaatttgatggcacagtaagctatgattgcgccactgcactccagcctgggcaacaatacaacatcctgtctctaaaaaaagaaaaaaaagaaaaatgaggcctagacatgttaaatatttgatacaaaattccttggcaagttagtggcagaaaatggcctatacccaggttttctaacccaaaaatacagagcttccattgtatataccacattgccacatttttaagaaagggttaaatatctgttaaactagaacccaactaactgcttaaaattttcctgcacttgggttaaagaggaaagaggaaaatcaaaagaaaacaaacaaaaaatattttaagctctttgatatgttaggaatatcacacactggtctgaaaattctaccttttgtatctatagagctatataataagacctgttgcccataatagtgaatccactcattgcaaagtcatgatcatacaactaaagatttaatcatattctagactactccatttattaggagaaatgagtatactacagcattgttacaagatttttcatgtactgaaatagttttctgattaaataaaatataccatttatattccattcccttaaacagtatggttattcaaagatctacttgaaacactgcaagtgtcatagtcctttaaaatctgttttattccaatgtcaaaaatattcagtagtaggcggggcacggtggctcacgcctgtaatcccaacattttgggaggccaaggcaggcggatcacgaggtcaggagatggggaccatcctagctaacaaggtaaaaccccgtctcaataaaaaaataaataaataaaattagccaggcgtggttgcgggcgcctgtagtcccagctacttgggagtctgacgcaggtgaatggcatgaacctgggaggcggagcttgcagtgagcctagatcatgccactgcactccagcctgggtgacacagcgagactctgtctcaaaaaaaaaaaaaggaaatgaggtaagctccatgtacctactactcagtaaccttataaaatcataacactttgccatattattctatacatctataagaaagtgataaatgcattacagacagtgttaaaattcacacgcataacgcttcctgatcccattttcctcctctgtcacagccaatcactatcactatccttgtttttaggattatcatctatatgtaagtttttatattattagtacacatatatccataaataacataccacatcactttgtatgttttcaaacctgatataaatggtatcatactgaatgtataatgatatgcttttcaagttaaacatgacaaagtctaatgaagttttaaaacttagagaagaaaaaacagcatgagagaaaattatttaaaattgtcaaaggtgtcaaaaattaaaatcttaccaaaaaactagcctaatcttttaaaaaattaaataaaattccacaattagggtcaaaaaatttgagatttaaaacagaaactagcaatctcttaactaaggaattactagctgaaatttatataataatatttctttaagtgttcattaggaaaaggtgtcagtactgaaaagcagctgaggcctagctaagcaaggggttcatttcttattggaatagtataggcctggtctgaggcttcacttcaaagtctctagagttcaattaaaactggattaggtagaaacagacccttctttgggactttctgttcactgaaactctacatacactgacagcaccttagacagaggtctagccctccaatgaatcagttgccatagaaaccatatcattaccattgctctgcagttatgacctcaactcctgaattgcttgaaatctttactctctttgaatgtttaccaccttgttttattattgttagtattattattagtaaattaagctttcaattgttttaaataatttgtttcaaagctggtttattaaatgttgagacagtgtgttagagaggagagaaaggatttagtattgaatacatagattatatacacacataaatattctatttatttactgtaaaacatcaaacctatcttttttaaaagttttatttaaaaactgtgccttatgaaaaggatatattatttttcccaaataatgcatgtatttcttccttctgtcctacaaatagtatactattaacacataagaaaattgcttcactttgttgcacttattcttagtaaaagtaaggcattttttactttccctttaccagtccatttgtaaaagcttataagtttatccaaataaaactcttttttgttttcttgtcctcatgaaagaacaaaaatagaaaccaacactcactgcccaactatatactcttatttattgaatactagggatttttaaaaagtagatttaaaatagttaaagccaatcctttaagtgaatagaaagggaggttttatttttttaaaaaaaactatccttgatacattttaaatgttttaaaattcctcctgaagggtaaatattaaaaagtgataaaatgttttacctcaaaaaaaagaaatacttacatgagagcctgcacatgtaacatcaataaaaggtattttaaaaattactattcctaaggtttaaaactagcatagcatatccctatgccaaatatttcccaaattctatagtaattttattttttcagacaattccagatttctgaagattttggtgttaagaataaaatcaggtaatatatatcaataacaatatttaaaaattcacaacagaaccatctccaaaccctatcaatacatttaacatcaggaaaaatgttgttagccaaatatacaaaatgtaaactaatcataccattcattaagcaataacacaatggctaagaaagtctagaaaatattcactatatcccattttaatggaacataattacatagtcacaggttaacactttaatatggaaaaactaattatttgaaccacctttaaaataaagacattgaaaaatactttcatatcaattcaccaataaatatatgtgcaaatgttttatgttacaataattgtaatttgaacaaatagcttaaagaattttaatcaagtattttaaagttgcatcactgttattaacatagtttttacattttgctatagttttctctgaaggtagatatcaaagcatagcacgtaatttactcaaataatattgaatcctagttggttcaaggatttacttcatcaccaaccatatgacttttggttttaaaattcaaggatatattctttaagtaaaatttagaggtcttttttgaatttgacaatgacaatgacacacagtcgactctggtggaaaatttaagttgataattttcttactaaatgtatatccatgaacacttagaatgtccccaaacttcaacaaacaacaaaaatgaaagtcatacataaaaaataaaattacctcttaaattaatcatgtgttgttatttaatttttttcatctatacagtatatttcccttctggtttcaagtactatgatgtagtatagtattcatagcatttcatgggtgacaaattcaattaaacatattcattactctaatgttctacttggcagttttagtcagtatgaaaaattaaaaatatataaataaaatgctatgtgacctttgtattgattggactaaaatggctttagcctgggtgtggacgatggggcagttgggaggggcaagaggggagcctacaaacacacacactcttatgttttctcttccaattactgagggagatgataaaaccacagcaaatgatgtatcagctcattttatcttatcgctttggggctaggtgacaatgaagttcatatttcacgggctcccattgaagactgtgaaaattacttgcccttatgacctgaaatttcactagaagacagaaatttctcttctgcaaagtaatgcaatttttcagatgtcaacctttagcccagctttaaaaattaatttcatttatattaaccaatgatattgatattttcacagaacactctttgatacatgaagcactgactggcaaattgatgttgctttagatgggtaaaactattttattttaagctgctgtggcacacagatttatggcaaactgaaattcccatttcataatttaatatttgtgctggagttgatgcacctttaagcccttggcctgtaaataattcagactctttacttggttgttttattttcaatattcctcagcttaaaaataatttgcattctaaatgatgcatcttaaaagccatctcttattcaactagcattaaatatcaatcttaatgagtcaaaagccaaacgtagtaatgaaggagaagaacaaagaaggtatttatttatcttccagctcatttttaattcagtttttaaaatttaaactataccataagtctaaatttttttttgaaagaaggcaagaaaccaaaatgaacccgcaaaaggatattaaggaaccatagcaaggaacatgaatatattttatatctttttcatagcagcacataaggtgaagagctgggtgataaatttgtagagaaggaacaaaatgaacttagatatttatctaaattaaaatagatatttagctttgaaggtaccttttaaaatacaaacaaaaacaaagccacaatgtcaatatcattgtgaacgaggcataaaagggtctcatctgattttagtaaaggagatactgaaattaccttgtatctgtacaaaagaaacatttcaatatacaatttcaatattttagagtaataaaaatgctactaaaagatgtatgatctggtgtctttacaagttacaactttattatctttatccagtaaagagttttgtctaattcaaataatgccttgagaagataatcattaaacaaatacccttctattttataaggaaagtcaagcataaatatgcatataacttatacattcatttatgatcttaaaattagaaaaaggctaagaaagccatttatctaatttaggtagtttctccccaaatggtttaacactgctttggctaaatttctatactcaaaataatttttgcacctttatgccaacaatattcaaattgttttttcttcaaaatatttatatttagttcttccttacatgtacggtatagaaaaaaatcataatataaattttccctttataattttttcatttagattgaaaatattcccaattacttctcaaaaagttgtgacaataacatgctattgttgctgaattaagctataaagtatttctgtcagggccaggcaaagtggattatgcctgtaatcctagcaatttgggaggctgaggcaggaggatcacttgaggccaggaattccagaccagactgggaaatacagcaagatcccatctctacaaaaaataaaattagatgactgaggtggcatgtgcctgtagttccggctactccagaggctgaggtgggaggactgctcgagcccagaaattgtttgaggctgcagtgagctatgactgcaccactgtacttcaggttgggcaacagagacttttttttttttttaagtatttttgtctaatgttccccatattgattctctatagtcataagctttctattccttactagagagttaaaatttaagtcaccactaataaaaaactaactttaaatatattggaatatttcacaataagtactttaaaacaaccaatgggcagaaactctctttcttctcaatgccaattcttccttcatgaactccatctttgatgggtatcaaaagccctccctaaaaaagtgttttacttctcatagaagtaaaaagtaaaacagaggatactagaggttggaaagtgaggtgggaagcaaggaaagtgaggtgggaagcaaggaacatggaaagatttgttaaaagatacaaaattacagttagacagtaataagttctagtgttctataccactgtagaatgactccagtgaacaataacatatagtttcaaacagctagaagtaggatagtgaatgttcccaacatgaagaaaggatgtttgacatgattaatatgctaattaccctgatctgattactatacattatgtgtatacaacatctttatgtaccccatgaatacgtacaactgttgcttaaaattttttaaaaataaaatgaccaaaggtaaagttaaaaaaaaaaaaatccccccttgggctgggcgccggggcttatgtctgtaatcccagcactttgggaggctgaggcgggcaaatattcctgaggtcagtagttcaagaccagcctggccaacatggtgaaaccctgtctctactaaaaatacaaaaaattagctgagtctggtggcgggcgcctgtaatcccagcttactcaggaggctgagacaggagaattccttgaacctgggaggcggaggttgcagtgagctgagatcggactactgcactccagcctgggcagcaagagcgagactctgtctctaaataaataaataaataaataatcccccctctcccagatgtatgaactaaatcttcaagttagagtaatatcagtttactgatagactattctgtgtagcagatacaatatgatttagccactggaagtttctctgttacctaagctacttaaacaaattaaagggaaaacctttgtttatcttgaagaaatttgcttttgttctttgaacacagcaagcaagagaaatgaaaagcaaaatggaaaggaaaaattaggaacatagaacttgatgctaagagcctaaaatccccaggatacatttttcctaatcagagggaaatacttttctacttttttaaaattagtacctgcctcctactaaatattaagcttgtttagttggagtcagttataaatgaatagtacagatttgtattcacttccataatagagcatggaactaaatgctatgctcacatttgccttcagacgtaatcttccaaaaagccattttcttaaaggacctatatgtaatagaacattatgaataaaacttaaataagacttttggggttaacctcatttcattgcgtaactccatattgttgcacaatcctcactagattggagttcatactttaactggagttcttatgacactacatcactagtcttagtcatctttctattcacagtatctagcacaatactgaagagactgactgatggatggagggccaactcagcttcactaagtgtctacaatcaggccagatgtggtggctcacgtctgtaataccagcactttggtaggccaaggtgggagaatcacttgagctcaggagttcaagatcagctgggcaacacagcaaaaccccgtctctgctaaaaaatgcaaaaattagctggaggtggtggtgtgtgcctgtggtcccagatactagggcggctgaggcaggagaatcacttgggcctgggatgcagaaggtgtagtgagccaaggtcgtgccactgtactgggcaatagagcaagaccccatctcaaaaaaaaaaggtatctacaatctaagattctgggaacacatgaacataaacacagcaaaaaacaaaagggggaagaagagtaaaatggaaaactacaacataaaaatttttaaaaatcaaattcaagggtcagaatacttccacttttgatgaagatggagtaacagggcctggatttatcctacctaaacaatatgcaaaatgaacataatatactgaaaagttgttttcaaaatattaaatattaagcaataaaaaacagtgattcctgaaaaacaggaaacaaaattgtgacacctattaatgcccaagcacaccatctggaaagactttgcagggcccagaggaaaatagagaaacgtagttagaacgtaatggtctcctgcagtagagaaaacagagcttgaagtacagggagatcaaggcatcaaaagcttgcagggcagagtagcagatcagagagagctgcaaagcaacagagctccagagatctgcagccttcagctgagtactgaccaagctatgaaagaaaacaatgtgagaccagtgaaagaatcatcctaagaaattacaatgaacagtactcagagctcacacagaatgtaaaaatctcatgattcatggagcactgtagagactactcaaaagggttttgccacagaagtgggggaaagttagctctagacttaatgctgctctagttctccctaaaaatcttaaaaccaagctccagatggatcaaactatttctaagtaacttaactgtatcccagaacaatgtattataaggaatgcaaaaatatccaccacacaactaggcaaaaatcactacaactggcattcaattcataattactgggcctgtaaaagaagcaaaacaacatgacccacatgaggagagaacttaattaaacaaaactctcctagaaatgaccatcaacagaatttttagaaaaagacatcaaggggagccaagatggccaaataggaacagctccagtctacagctcccagtgtgagcaacacagaagacgggtgatttctgcatttccaactgaggtaccgggttcatctcactggggtgtgccagacagtgggtgcaggacagtgggtgcagcgcaccgtgcgtgaggcgaagcagggcaaggcattgccttacccgagaagcgcaaggggtcagggaattccctttcctagtcaaagaaaggggtgacagacggcacctggaaaattgggtcactcccaccctaatactgcgctttcccaacgggcttaaaaaatggcacacaaggagattatatcccgcacctgactcagagggtcctacacccacggagtctcgctcattgctagcacagcagtctgagatcaaactgcaaggtggcagcgaggctgggggaggggtgcccaacattgcccaggcttgattaggtaaacaaagcagccaggaagctcgaactgggtggaggccaccatagctcaaggaggcctgcctgcctctggaggctccacctctgggggcatggcacagacaaacaaaatgacagcagtaacctctgcagacttaaatgtccctgtctgacagctttgaagagagtagtggttctcccagcatgcagattgagatctgagaacaggcagaccgcctcctcaagtgggtccctgacccccgagtagcctaactgggaggcaccccccagtaggggcggactgacacctcacacggccgggtactcccctgagacaaaacttccagaggaacgatcaggcagcagcattggcagttcaccaatatccgctgttctgcagccaccgctgctgacacccacgcaaacagggtctggagtggacttctaccaaaccccaacagtttggtagaactgggtctggagtggactctaccaaactctctgcagctgagagtcctgtctgttagaaggaaaactaacaaacaggaaggacatccacacaaaaaacccatcaggacattaccatcatcaaagaccaaaggtagataaaaccacaaagatggggaaaaaacagagcagaaaaactggaaactctaaaaaatcagagcacctctcctcctccataggaacgcagctcctcacgagcaacggaacaaagctggacggagaatgactttgacgagttgagagaagaaggcttcagatgatcaaactacgctgagctacaggaggaaattcgaaccaatggcaaagaagttaaaaactttgaaaaaaaattagacgaatggataactagaataaccaatgcagagaagtccttaaaggacctgatggagctgaaaaccaaggcacgagaactaggtgatgaatgcacaagcctcagtagccgatgcgatcaactggaagaaagggtatcagtgatggaagacaaaacgaatgacacgaagcaagaagagaagtttagagaaaaaagaataaaaagaaatgaacaaagcctccaagaaatatgggactatgtgaaaagaccaaatctacatctgactggtgtacctgaaagtgatgggcagaatggaaccaagttggaaaacactctgcaggatattatccaggagaacttccccaatctagcaaggcaggccaacattcaaattcaggaaatacagagaacgccacaaagatactcctcgagaagagcaactccaagacccataattttcagattcaccaaagttgaaatgaaggaaaaaaatgttaaatgcagccagagagaaaggtcgggttacccacaaagggaagcccatcagcctaaaggctgatctttcagcagaaactctacaagccagaagagagtgggggccaatattcaacattcttaaagaaaagaattttcaacccagaatttcatatccagccaaactaagcttcataagtgaacaagaaataaaatactttacagacaagcaaatgctgagagattttgtcaccaccaggcctgccctaaaggagctcctgaaggaagcattaaacatggaaaggaacaactggtaccagccactgcaaaaacatgccaaattgtaaagaccatcaaggctaggaagaaactgcatcaactaacgagcaaaatagccagctgacatcataatgacaggatcaaattcacacataacgacattaactttgaatgtaaatgggctacacagactggcaaattggataaagagtcaagacccatcagtgtgctgtattcaggagacccatctcacatgcagagacacacataggctcaaaataaagggatggaggaagatctaccaagcaaatggaaaacaaaaaaaggcaggggttgcaatcctagtctctgagaaaacagactttaaaccaacaaagatcaaaggagacaaagaaggccattacataatggtaaagggatcaattcaacaagaagagctaactatcctaaatatatatgcaaccaatacaggagcacctagattcataaagcaagtccttagtgacctacaaagagacttagactcccacacaacaataataatgggagactttaacaccccactgtcaacattagacagatcaatgagacagaaagttaacaaggatacccaggaactgaactcagctctgcaccaagcagacctaatagacatctacagaactctccaccccaaatcaacagaatatacattttttttcagcaccacaccacacctattccaaaattgaccacatagttggaagtaaagcactcctcagcaaatgtaaaagaacagaaattataacaaactgtctctcagaccacagtgcaatcaaactagaactcaggattaagaaactcaatcaaaaccgctcaactacatggaaactgaacaacctgctcctgaatgactactgggtacataacgaaatgaaggcagaaataaagatgttctttgacaccaatgagaacaaagacacgacataccagaatctctaggacacattcaaagcagtgtgtagagggaaatttatagcactaaatgcccacaagagaaagcaggaaagatctaaaattcacaccctaacatcacaattaaaagaactagaaaagcaagagcaaacacattcaaaagctagcagaaggcaagaaataactaagatcagagcagaactgaaggaaatagagacacaaaaaacccttcaaaaaattaatgaatccaggagttggttttttgaaaagatcaacaaaattattagaccactagcaagaataacaagaaaagagagaagaatcaaacagacgtaataaaaaatgagaaaggggatatcaccaccgatcccacagaaatacaaactaccatcagagaatactataaacagctctatgcaaataaactagaaaatctagaagacatggataaattcctcgacacatacatcctcccaagattaaaccaggaagaagttgaatctctgaatagaccaataacaggctctgaaattgaggcaataattaatagcttaccaaccaaaaaaagtccaggaccagatggattcacagctgaattctaccagaggtgcaaggaggagctggtatcattccttctgaaactattccaatcaatagaaaaagagggaatcctccctaactcattttatgaggccagcatcatcctgataccaaagcctggcagagacacaaccaaaaaagagaattttagaccaatatccttgatgaacattgatgcaaaaatcctcagtaaaatactggcaaaccaaatccagcagcacatcaaaaagcttatccaccatgatcaagtgggcttcatccctgagatgcaaggctggttcaacatatgcaaatcaataaatgtaatccagaacataaacagaaccaaagacaaaaaccacatgattatctcaatagatgcagaaaaggcctttgacaaaattcaacaacccttcatgctaaaaactctcaataaattaggtattaatgggacatatctcaaaataataagagctatctataacaaacccacagccaatatcatactgaatggacaaaaactggaggcattccctttgaaaactggcacaagacagggatgccctctctcaccactcttattcaacatagtgttggaagttctggccagggcaatccgtcaggagaaagaaagaaagggtattcgattaggaaaagaggaagtcaaactgcccctgtttgcagatgacatgattgtatatctagaaaaccccattgtctcaggccaaaatctccttaagctgataagcaacttcagcaaagtctcaggatataaaatcaatggcaaaaatcacaagcattcttatacacgaataacagacaaacagagagccaaatcatgagtgaactcccattcacaattgcttcaaagagaataaaatacctaggaatccaacttacaagggatgtgaaggacctcttcaaggagaactacaaaccactgctcaatgaaataaaagaggatacaaacaaatggaagaacattccatgctcatgggtgggaagaatcaatatcatgaaaatggccatactgcccaaggtaatttatagattcaatgccatccccatcaagctaccaatgactttcttcacagaattggaaaaaactactttaaagttcatatggaatcaaaaaagagcccgcattgccaagtcaatcctaagccaaaagaacaaagctggaggcatcactcttcttgacttcaaactatactacaaggctacagtaaccaaaacagcatggtactggtatcaaaacagagatatagaccaatggaacagaacagagccctcagaaataatgccgcatatctacaactatctgatctttgacaaacctgagaaaaacaagaaatgaggaaaggattccttatataataaatggtgctgggaaaactggctagccatatgtaggaagctgaaactggatcccttccttacaccttatacaaaaattaattcaagatggattaaagacttacatgttagacctaaaaccataaaaaccctagaagaaaacctaggcaataccattcaggacacaggcatgggcaaggacttcatgtctaaaacaccaaaagcaatgttaacaaaagccaaaattgacaaatgggatctaattaaactgaagagcttctgcagagcaaaagaaactaccatcagagtgaacaggcaacctacagaatgggagaaaatttttgcaaccaacccaaatgtccaacaacgacagactgggttaagaaaacgtggcacatacacaccatggaatactatgcagccataaaaaatgatgagttcatgtcctttgtagggacatggatgcaactggaaaccatcattctcagcaaactattgccaaggacaaaaaaccaaacaccgcatgttctcactcataggtgggaattgaaaaataagaacacatggacacaggaaggggaacatcacaaaccggggactgttgtggggtggggggaggggagggatagcattaggagatatacctaatgctaaatgacgagttaatgggtacagcacaccaacatggcacatgtatacatatgtaacaaacctgcaaattgtgcacatgtaccctaaaacttaaaataataaaatttaaaaaaaaagggggggggggggagaaaaagacatcacatgagaccaagcagttttgttttgttttttttgagacagacccttgctctgtcacccaggctggagtgcagtggcgtgatctctgctcactgcaacctctgcctcctgggttcagacgattctcctgcctcagcctcctgagtagctgggactaggactacaggtgcccaccaccatgcctggctaatttttgtatttttagtagaggcggggtttcaccatgttggctaggctggtctcgaactcctgacctcaaatgatccacccaccttggcctcccaaagtgtgggattataggcaggagccaccacgtccagccccaagtagattttagagcaaaacatttaattagggataaagagggtcattttataataatatcatttcatcaagaggctttatttaactatcctaattgtttatgatctgaataacagagcttcaaaacacaagaagcaaaaactgagagaactgaaagaagaaacacatgaacccacaatataaacatttcaacattcctctgtaattaataaaacaagaagattgaaaaatcaataaagatacaaaggagttgaacaagaccatcaaccaacagaacctaactgacatttatagaacagtccaaccccagagcaaggttacgaaaagcatattttgggctaaaattcaagttgcaataaatttaagactcaaatcagataaagtatattctctgactacaatagaagtaaattaaaaatcagtaacaatagattgtttgcacagcatggtgactatagttaatggtaatgtactgtttatttcaaaattgctaaaagagattttaaacattcttaccacaagatataagtatgtgagttaatgaatatattaattagccagattttatcattccacaaaatatacatattattaaaacatcacacagtaccctatatataccattattatttttcaattaataagaaaatttaaaaaaagctatctggaaaaggccccaaatttgaaaattaaatagtacacatctaaataacctatgagtaagagaaaaaaacgaaaaggaaattagcaagtatttaaaattggatgaaaatgaaaacacaattttaaaaaattctagaatacagctaaagcagtacttagagggaaatttacagcactaaatgcatatattaatgtgaaagaaagatctcttttcagtgattttgacatcccctttaggaaaaaagaaaaataagagcaagttaaacccagattaagcagagaaaggaaataataaaaatcaaaagaatagaaaaccaaaaaaaaaaaagagagaaatatcactaaaacctaaagctgtttttgtgttttgttttgtttttttaaaaaaagatcaataaaattgataaacctctgaccagagattagggaaaaaaaatagatgtaaatcacgaatatcaggaattataacaggaattaccaatattaggagagaagagacatcaaaacagatttttagacattaaaaggataaggggatatcataaacaaatagtttggactactttgatgcgatgaacagatctcttgaaagacacaaacttggccaggtcctgtggctcacgcctgtaatcccagaactttgggagacagaagcaggcagattacttgaagtctggagttcgagaccagcctggccaacatggtgaaaccgcatctctactaaaaatacaaaaacagccaagtgtggtggcacatgcctgtaatcccagggacttgggaggctgaggcaggagaattgcttgaaaccaggagggaggtggaggttgcagtgagccgagatcacgccactgccctccagcctgggcggcagagtgagactccatctcaaaaaaaaagagaaagatacaaactaccaaacccctttcaagaagaaatagattgcataaataatacaatatctaataaagaagttaaatttgtagtttaaatcttcccaaaaagtaaactccaggctcagcagactacactggtaaattctaccaaatatttaaggaagaaactctatacaaacttgtccagaatattaaagaggaaagaatacgtgccaactcgttctatgaggtcagcattatccagatgtcaaaaccagacaaacacagtataagtaaaaaggcagtctgcacttaaatatttgtaaaatttctctgtcttgagacttactgtggataccctacaaaataaatatattaaatgtcttctcatactaccttcccactcttgtaccttcacaaattgtcactcaatgcacccatctttctctcggatttctcaaaaacatctacgcagtttccttttgtagtacattccaacttgacttcctttggatttcaacagagtggaattcttagccttcttagtttacactgagtgatttcatcccgaatcactgcttctattgttgccaaagcacgctggggtgtgagatgtagagctaagatattagaggtcagttttagacccctatatccaatcacctataaatagctccaccatatgccctctaaactctcaaattcttttattttttattattttatttatttacttttcattattttttgagacagagtctcactctgtcgcccaagctggagtgcagtggcgtgatcttggctcactgcaacctccgcctcccgggttcaagcgattctcctgcctcagcctcctgaatagctgggactacaggcacgtgccaccatgcctggctaatttttttgtatttttagtagagacagggtttcaccatgttggctaggctggtctcaaattcctgacctcaggtcatcctccggccttggcctcccaaagttctgggattacaggcgtgagcctccatgcctggcctaacctctcaaattcaacacatccaaaaacgaactcactaccacccctcaacagctgtcattagtccaattgagactatttcagttagcagagccataaacaccatgtaagccaaacaaaaacttagttatgctaaatactacatctcactccttttgaccctcactcacctctcaatgaactacttcacttgactctatctcccttctgcttttagtcatatagggtaaaacctactttagaagaggttcttatcatcttttaccattttcatagacatatcttatattctaaacatgtcatacaacataacactccttcaatcacgccatgctgcttcatgcttaagcatctcccagtgtgatggtcttcctaactgcaatgcagcttctttcaacgtgcaccaccaaggaggtggtggcagtggttgtattaaagtagtaccagacagtaatagcggtagcagcaacaaacacaacttacttagatctcattgtatcccaggatctatgctaagtgattcaattcagttatttcagctaactctcaaaatggcactgtgaaatcgatgtcattttcaccattttataaattaacaaacagtctttgagaggttagatgacgcagtcaaaatcacataactagtaagtagtgtagccaagtctatcagacttctgacattatgctctgagccactatataatactcccaccacagagaacttctcatccttaaaggccaagccaagattttgcaaaagctctgacttctcaaacagatgtgctaccacaggcctcttacaaattgtaaatgtctccctcactagacaattactgaaggcagatactaaacagtacttattttagtaattccagtgctactggtacatcacagaactcaataaatgtatacccaatgaattaatgatgagattaacaatttcagttgaaacagattcctcatcttccactccatgtttctataattagtttcaaaactgaacagaaaagagagatctttaggctttttaaaatagcgaactgtgtatttcagcccctggtaagggcattggggaggccataatcaaggttagccaaatttgttgtatctggagaaagtggttcaaatgacctttcataactactaaggaactggaaacttatgatttagatcatttaaaaggaacttattataagaattaaaaagtgagtgttatgaactgaatgtgtctttccaaaatatgttgaaatcctaacttccaacgtgatggcaacaggaggtgatttggactttgggaggtgaacaagtacttagaggagagccctcatgaatgggattataataagagactccagaaagctctctagccctctttccaccaggtaaggatagaatcaggagtcagcagtctagggctccacaccagaatctaccatgctggcatcctaatctcagactttcagcctccagaactgtgagaaataaatttctgttgtttataagccacccagtctatggtactttgttatagcagcccaaacaaagacagtgctttttgagaaaaaaaaaaaaaaaaaaaaaagatgaagagtccttgttctgcagtgaattattagaacctaaaagaaacatgtttctgaacaccttcacctccccccaaaaaagggaacaggtaataaaaatatgcaatgtagatttgctatattatgtaagaatattcaattctgctttagaagacaagaaaacaaatgtgatagatgaacacaaaagaaacattaaacattaatagtaacataatagcttccaagatgtaggcaaaaagtcataggctatgttaagtataggtaaggaagtaagtggcttatgagagacagacaaaattcaaatgatgttaaatacgtacagtcaatttaaagtttgaaatcagcaagacctgtcaaagacagaatacattgaatgtatgatggcacacaaaaaaagtgctatttacagatggatggaaagaccacctcaaggtataatcatactacctctgtgctgggtctctcatatttctgcagatcttagaggaaagtagtaattgccatcttatatgacacactgttttcaaggatgtttgcataattaatagccttggaagagacagtatctcagtttacagcaatgggcaggtttgtttactgtccagtataagaaaggtaatgatgctttataaggcagaggccagatcttactgcccattgtaaaaattttaggttctctacagttgaggttgcttaactgggatgtaaactcactgggaacacagcatccacctgggtcccacctgggtcctcattgggaacacagcacccacctgggtctgttcatgatgccctaataaaatactgcagactaggtggcttaaacaacaggtgtgatttcttggagttctggaggctgggaagtccaagatcaagttgccagccagtttggttcctgctgagggctctcctcctggcttgcagatgacttcctgctccctgtcccctcacatagtggagacagagaatttctctttcatcgtcttcttataaggccaaagtcctatcagattggggccgcatccttatgacctcatttactcttcattacctcctaaagagtctatctccagattcagtcacactgggggttacagcttcaacatataaattttggggaaatacacatcagtccatagcatctccaacaagtcactccatgaaacttggggatgcgagggaaatagacactaacaagatgcttactctgcttgtgctgtaagtctttgtccctaacctttgtcctatgtcttctgccaacatctaagaaactgtggcaagataaattgttagcttgcatttcagacctttcatagtttttttgttgttgttttgttttgtttgtttttgagatggagtttcactcttgtcacccaggctggagtgcaatggcatgatcctggctcactgcaacctccgcctcccgagttcaagtgattctcctgcctcagcctcccaagtagctgggattacaggcatgtgccaccacgcccagctaattttgtatttttagtagagacggggtttcaccatgttggccaggctggtcatgaactcctgacctcaggtgatccacccgccttggcctccttaagtgttgggattacaggtgtgagccaccacatgccgggcccctttcatagttcctgacaacctggatgatatctatgccggctttaaattgcccacccattgataatacccagtatagccccactctggcccctgtggttttatctgcacaagaaatgcagaaaaaaacttgtaaaactattcagcaggttaattggttggctccagctatgaccagggatagctgctgctgtgtgtctctaatagagctggtgtgtttcattggaccggaacactttccttctgtggtctcccttgtactcaaacctcaattctggcacttgtaacatcaaagaaaggcatacgaggcagaaaaagagacaggacatataaatgttacatgaaccaggactcaagaactctgatctttctacctgcttgcattcgatccgaagtatattaacttatcccaactctcttccatttcttcttattgcgtatgttaaattgatttaatgaatcatctgctttgagaagcttatttgatctgtgagcccttctgttctgtgaaatctgggacgacttgcctggtagtgtactaggaggcaacattgcattaggtaatttcccacagaacaggttcatagctaacctttatctcgccttaaactaccgttgaaaaaaattattctaggccactggggaaaaaataggaagctccataattcatttattaagccagcataatgttaatgctgaaaacttaaaaagagataaagagactatcaaaaaggaaaataatagagcatttttatcactgaataaagatacaacactcttaagtaatctgtaagcaaacagaatccagcaatgtctaatgagaacaatataacattaccaaggagggtattttcttggattgcaagagtggttcaataccaggaaatccacaacaggagatctactccttatatcaacaaattaaaaggaaaacattgcatcatcatttactagatgctgaaaagcatttgatcaaattcaggaaccaccactaaagaaaaaaagttagtaaaacaggagtggaaaatattacgtaaaataaagactttttaccagaaaccaacaacaaatattagctatgtgatctggggtcagtcatgtaggcttctcacctcagatgcttgtcttaaattaattagtgtaggtacagctagtaaaacagggcctggcacatcataagcactatgcatgggttagcaattattattacaataataattatcaccagtcaaattgcaaaagttgtaataaatgaaataataaaatgtaaaacctggtataaacattgaaaagaaagatgaaaatgcatttgaaatatccaaagtactccaaatgattaacggaaatatatataagataaacatgggaactattaatatttgttctccattttagcatttgacacaaatattgaaattagaaaaaaatttcattcataattgcaagaaaaacattacacacttaggaataattttaacaagaaaggcagagagggaccatgggacaaaaaatataaaacaattattagaggaacacaaagtacaatctgaacacccaaaaaacttttataatagtaagaaaataccattaaaatgtaaatttaccaaaaaccaatatgtatatgagttttataaattataattaaagtgacaataggacttttttaaaggcttcataaaattatttaatgtttacaaactatataccagaaaatagtcaataaaaggatgaaaacaaagactagtaaggagtattctaccttaaacaatatgcaaatggcataaaaacaaatatatatttttttaaaacattagactgtaattcagtctgacattttctattctcttttttttttttttttttttttttttgctaagtacctgttgtgatgcacaaagctgatagcacagcttaatgtggaatgatcaacacatatgcaaagcacctagactgtacagtggcttgcacacagttacctttctattgttcttcccatgtgactacatatataatctaaaggccaagagaatttttaaaccataattggaactcagaaagtactaaaaaatatttatacctataactttgtaaaattgtaaaattaatggcaaaaatatgactgataaagtcaaatagtgaaagatctgaaaaagctatttcatgataaagggttactataatatacaatacttataaaataaaaaatgaatagaaaatggataaagaatataaaaggaatttcacagaattcaaatgtccagcattttaaaaatgctgaagtttattagtagtactaaaaaagacattaaaataatttataccccagaaacaataaaaaaattaagagttataatacattttgctgacaagagtgcagacaaaagtgtatattgttggtagaagcatgaaatgtaaaatccctttggaaagtaatccaaaattatttatcaaaaataaaaatatgtatggcctttgacccaacaagcttttggataacaaatagaaataatagttttattacatcaacatgtagggatggttattcccacatttttcatagtgacaaaaaaatgaaaataagactttgaaatccaatgcaaatcactgggaaaatggtggtatatttatgatgtatcttcttcagtcatttaaaagaatgaattaaagtcacagagttgacttggctggatatccacaatcaatatattatggagtgagataaacaaacataccaagttgtatatattatatgactttatttttgtaaatcaatgacactcactccctacaacatacataagtttatatgaaaatgaagaaaaacatgagaagattacgtactaggttgcaaatatatgttaaggtgttgccaggcacagcggctcacacttgcaatcccaacactttaggaggccaagacaggaagactgcttgagcccaggagttcgagaccagcctaggcaacacagggactctgtctctacaaaaaaatacaaaaattagccaggcatggtggcatgcagccatagtcccagctactcaggaggctaaggcaggaggatcaactgagcctgggaagtcgaagctgcagtaagccatgatcatgccatcacactccagcctgggcaacagaacaaaaccctgtatcaaaaaaataaataaatagaaggtgttctgggggatagatgatgggggcaagaggagaaagccaagacaaagaaaaacaggatgcataaaagtaaaatgcacatgctaacaaaaaacaagcaatgagtagattatatttataataagctgcgggtatattcacaaacatataaaatctgaatgatagcaggtatgacattatttctaaatttttttctatgtcatattaatagtatttgtataaagtagaattcccttatccactcagaggtatgtttcaagaccccttaggggacatctgacaccacagacagtaccaaactcaattgtcatcagttggaacatggttttcttcagactttccgcccacaaatgcaatgctttttccaccttaactaagcacttattatgcactgtgctggtaacttttgcagtttgaagtatgacagcaaaactagcacaaatttcttattccctcttcacaattttatagataaagatgcattcttactatggatcttagcaacctcaacatacgctatttcttctttcagttcgagaactttcaccatttcacttcgaggaatcattttacagcttctctttagcatatctcaattgccaacatcactacttttgaactttgggacgattagtaagtaaaataagggttacttgaacacaagaactgtgttaccacattagtggatctgataacctaagcaactaacagcaggtagtgtagacagtgtggatatgctagacaaaggaaagatccatgtcccaggcaggaaggtgcaagatttcatcatgctactcagaatggtgcacaatataaaacataaattgtttattttgggaattttttatttacaattttcagtctacgattcaccactgtaactaaaactatggaaagcaaaaccatggataaggggaggctactgtatggtcatgtaggatgaaagtcaacttatctttctttcctttcttttagtttccagagctcaacctgcttacctttttttccctactttaacgtttgcaaaattctttctataggtttttgagaattcttcgcctacaaccagcctcccttccttctcattgtccttaaaaataagaatacaaaccctttgaattttaaatgttttactcttgttttctatcaggcaccaaatattcaggtgactgatagaatgattcacagacctttgtgagtcattaagtgtgaaacatgattcagaagtagcaactggaaacaaacacagtcctctgttaacatctcagagttcaccaaacttttttcttacccatctctgatctccataggcctaatgtaacaacaagagtagaatactaattttctggggtactgtgggtttgtttgcttttttttcctgaggaccggtatccttaaatgcctatctctgtgacctctgccacaaacattaatagtcccacatttgttaatgcatttttatgttgatacaaatatagtcctttcctagataattttttttcctttggtttattttacttcattcataattcatatcaaaatagcaatatttaaatgagacaagtcaattccttataatacattcttccattttcaaagccttgcacatttaagaattaaaataagagaaaacctttagaagtttaaatccattattctttttttttacttaaaattttattaaggtatagaaaatacttggtaaaatacaaagataacaggtgtggaacttgatgacttctaataaattcagacacctatgtaatcaccatcctattataatataatatttccatcatcccagaaaggttgctcacatctcttcactgtcaacatctcctgtaaacattcactgttctcatttctttcatctctgattagttttgcctaatctacgcatgatacacatggaatcgtacatcatgtatccttttgtttatggcttctttcactcaccgtaaagtttttgaggttgttccaagttgttctgtgtattgataattcatttctttttattactgagtagtattgcattgtataaatgtaacatgattggtgtatctacccttcatttaacattcaagtagtttactaagaataaagttgatgtaaacatttgtgtactagtctttttgtgaaccttgtgttttcagtcctcttggacaaatatttaggagtgacactgctgtttcataggataggtggtatgtttaagttttgagaaactgccagaacagttttcaaaacagttgcactattttacactcccatctgcaattgataggagttccagttcctacacatcctagctaacatttggtgttgtcagtcttactaattttagctatcctaacgtgtagtagtgtctcctggtggtttttcaagacaacaaattgtgctgaacattttttcaggtgcttattggccactcacctgccttcctttatcaagtccctaatcaaatcttttgtccatttgttttattgagttatctttttattattgatttgctaatatttagtagacacaagttttgttagataaatacatggaagatattttctcccagtttgaggcttgcctaatcattttgttaataatctaatatcattgaggagatataattttctagaagtctcttgttcttcaatggtaaatgggtcttgaaaagacatcttttgcaaatatattttttaaaggcagcttgtcaatttcttgaaatgacctactgggaatctgaatgggattgagttgaattgatagataaatttggggagaaatgacatctttataatactgagtcttatcatcaaagaacttgtcatatctttcaatttatttaggttttatttttttttccttaggaatattttgtagttttcagtgggcttacagatatttcaacaaattattcctaagtattttatgtttattgaatattattgtaaatgatattaaattcatatttttgaattgttcatagaaaaaacaatttttatgcccatcaatggtagatcagataaagaaaatgtggtacatatacaccatggaatactatgcagccataagaagaatgagatcatattctttgcagcaacatggatacagctagaggtcattgtcctaagcaaactaacgcagaaacagaaagccaaataccacacattctcacttatttgtgacagccaaccattgagtactcatggacacaaagaagggaacaagagacactggggcctacttgaggttgaagggtaggcgagggtacctatgtacctattgggtaactatgctatataatagtataatagtatacctattgtatactatcttgtacttgggtgacataataatatgtacaccaacctatattgtgttttagctatgtattcattttcttaaaaacaatagagacctaattaggttatttatttttaattaaataagctttagaagtttctgtcttcccagtaatttgttcatttaatctaaattgtccaatttattattttcatggctataacatgtataatgttcttttattccaatattggtagttcataccttctctgttttttattaatctgattagatgtttatcaatcttatcaaactttttaaaaaacagcttttggtttcactggatttctagttttttaaagttgatttttttccttttacctttattatatccttccttatgtttgagtttaatttgctcttcttctgacttcttaatgatgagcctcagatatttgattttaaacttttctgttgttctctatattgttatttataaagatataaatttcacagttataggttttcctctaggtactattttgtccatatcccactaattttgatatattatcttttcttttcacttttattgtggagattgggtttcactgtgttgcctggtctggtcttgaactcctggcctcaactcatcttcacacctcagcctcccacagtgctgggattacaagcatgagccagggtacccagcctctattttcattatgactgttaaatacttcctaatgtccctaatggttgcctaaccctatttaagaatatgttgcataatttgaaatatttgggatttcccagatatcttcattactttgatttctagttcaactgaattatgaataaagaatacaatctctgttatttaaattctattaaattagtgcactccttttataaccaaacaaatggtcttcacagtaaatattgcacttgcatttataaggatgaggaattctggagttaaaggtgatgtatcaatctcaattaggttaaatttgttgatagtgttcatgaattctacataattactgacaatacctattgttctatcagttactgatagaaaaattttgaaatctcaaatataaccatgaatttaaatattttcccttcagtttgcttcacatttaaaatctctattatttgatggtatattaattattactgctgtaacaaattaccacaaacttagtggcttacataacacaaaattattatcctataattctggaggacagaaataaaaaatgttccttaatgggctaaaaccaaacctgagttcttttcggggccccaaggatggtgtcatctataagaaacaggcttccaccagacacaaaacctgccagtgcctcaatcttggtcttttcaggctccagaacagtaagaaaataaatttctattgtttacaaattacccagacttaggtattaatattttgttagaggagcacaaattcactaaaagagaaattgttgtcaagagtagaatattgctacaacatatatctaaaaatttaaagcagttttggaactgggtaatgtgacaatattagtatgaatagaaggaagtcagatgctattcatcaaagcaatgcaagaataactccccaaagcatttcagagatctttgagtctgccacacctattacatgcccagagtgccagggcctgagggtagatctttttcaaaggaggggcccacaacaccagaggggctcaaggcacccgtggtaacttggggctcaccaaccagcacagctcaagtctccgcttcccgcattccagtacagtgctctttggccaccccagctatagctgaggaagggccaggtgcagttcaggccacctctctggaggacataagtgataagcctcagtagcatccatgtggtgctaattctgcaggcccacagagtgcaatagctgtggaggcatgacttctccacctagattttaaagaatccttccaagagtcccatggccaaggcagaaaactgctacagaagtggggccactgaatagagcccccactagggcaatgcctagtagagccatggggttgggaccaccaaagacagcacccactagagcaatgtctagtggagttgtgggacctgtcccacagttgtattttgaaggcggtaacttgtttgatttcacaggttcacaactgaaaggcaacttgctaaggctaaaacacaactttcagtctcactcagtctgacttggatggcatctacatgatattctggacgttaaacttttgagctagaaggagttaagacttttggtgctattgtggtagaataaatgtgttttgcatgtgaggttgacatgtattttgcggtgggaatgctatagtctgaatttcccccaaaattcatgtggtgaaacttaatctctattgtattgggcagtgtggtctttggaggtgatcaagtcatgagggctctgcccttatgaatgggatggataactttataaaagggctgaaggttgaaggggccactatcttaccctttctccatgggaggacacagcagcaaggtgccacgatggaagcagagagcagccctcaccagacacaaatggtactgacttcaccgtggaattcccagacaccagaactataataaatttctgttcttcataagttacccaatctcaggtattttgctataccagcacaaacagactaaggcaggtgagaaatgctctagttgacatatcctatgaggaattatatgagatccagatgatatcactagtgatggtaacttcatcacttgattaaggtagaattagccagattttaccaccgtcaagttaccataattcacttcgcatactcttttctatggaaatgtgtcactgaatctagactatcctcagagggaggtgggaagagtaggaattaagttccagctcctagaatgggaagaatctatctatctacccatccatccatccatctatacacaaatacatactagattttaaagttgtacaatctctgtcacttctgggactccactatttaatgatgtttctcctggattagaaccatattttcctgcttctttgcatgtctagtcattttgtgtgttagacattatggactaacaattattttatctacatgttgttgtcttactttagagaataatgaagttttgctctggcagatgggtaatttaattgtgaatcagatggttccttttcaaggttgttttaagctttgttaagacaagtacagagtactatatattatctaaggatacaggagagtacttatagtctcctacaagcacttcttatacatggtcataaaatagaataattggggcaggatgggaacagcagaaattaattttttcttatagttacatcactaacaatccatactaccttcctgacagtacttttcacctaggcaaatgattgtactccataatttctcacacaaaaattaatctacaggcttcttgcaatgtttatttcaccataattttaccttaataaatgtgaacagaagagtggagacagggtaatatagccaggctaatttgaatcctggactttccaagggataaaccaaaaccaatgggcacaaaccctgatttcactgtgttctacccaatagaaaataaaccagcccaagcataaagcagcccaagcatcattcaggaattttatacagttatctatcatgggatctttgcttcttaaactttattatatttactaatggctttcacagtctgtaggcatatttttcactgataatgaaatacagtagaaaatatcctgaggaaaaaatatttaagctttaaactcaggctacaggtagattgtcccttcaacttacaaatattgtgtattgtgaaatactgcctgtaaactagcaattagtcccactgaaatttaaaaatattaattagatgccaaggttttctcataaattactatttgattcaaaaagtgactgaatcatttaataattctgaattctaatctcgcaaaggccaaacatcctcttagcttcttcccatctcaactccaaagcctgacagaagtaatcatttttatagaggttaacaataattcaaaatttctaagtaaagagtgacctatatatatcttgatatttgtttggaaagtttgggaactctttaatcaattgtccaattacaaaggtctaattctactaagagcaaatgttaaaatagatttcaattctatatgtactgaaaacagacttacagacaataatatttttctatttatgtcttatatgaagtattatcagctatggagtgagcatcagaaggcattgtgtatagtctgcatatttaaaaaaaactgaagaaaatattattttatgctgttcctatgcagtcaatgacatgctctggcttttttttttctactaagagaacacattttgatttcagtgtttttccattatgttcttttttttcatagcccaaaagattcattactttgataaccatttatcagggactcaagttcaatctataatacctattgaaatagcaaataattcagcctcagtgtctgtgtgtgggaaaatgggctgtgtgctagataaacggcctacctgcctctgacacagattaggtcatcattcaaactaaccacagatctctagaacaaatacaaggaactacaggttcactttagctgatgtttctgttttagaaacagtcttccttttagagagttacaatatcatcaaagtatcatggcacaggcttgaaaaaccagcatccaggaacgtaaggatagaaatatttcacaatttttacaaaacaccaattatgcaacacatacttatatctgatttctcttttacactagggaatcttataaaacccctgctatttccatctgaatgaaattatataactatattatgctaggttgtaggcaaggaaagccgttacagacatacatctctttccatatacaaataagctctattttattcctctcaaatttctaatctcttcaatcttgctattagaagaaagaagtaaacattatttaaagaaggaaaccagttggctaccgagaccaatcctcacagggtgtaattaccttggtaaattcagcaaaatccagtttacattaattttacagattcagaaataaagtgttattacaaaggaagattcatttgtgaggaatatatttcttttaaccaattatacaaaatagaataaatgacttttaagatctacagaaagcaacattgccaatgaggagactagacacagagtacattccttttgtacagagaaaaaagaaaggaagaaaagaaggccaactaaattcagaatgacagcttactgatttaaaatgagaaattataatggctgttttctggttaaccatgggagagtaaccttacatttttatctactcccttgccctatggcagactttgaaggttacatcccttaacctccatttccaaacctatgtttccttgcattcttctgtaacagatgtttcacctcctctataatatgctcatttgcagttacagattgtaaaaacagtcttacttaatgagatatacagaaaaatttgataagggggattgtgggacaagcatcagtttctcaataaaaagatggataaatatgttatagccattctctcttcactttctccctcctatttaaactttttattacgaaaattttcagaccttcacaaaaatagactagtataatgaaacctttatattaatctatgaaacaatttcaataattatgccagatttgtatcatctatttcccttgcgacttctttccttttggaatattttaaagtaaatcacaggcatcataacatttcatccataatttcttcagtatggattcctaacagatgaagacttctatttttaattaacataaacatgatgccattatcatgtataacaaaataaacaatttattaaaattatctatgtgtaaaaatcctgattgtctcaaaaacatatttttatatttaactgtttccaaacaataatcacagaagatctatatatcacaattcgttgatacgcttttcaagtttttaatcaatgagagaatctctctcttcttcttttcttctactttttttttttttaaagaaactgggttatttaatctatagaatttaccatattctgtgcctcgctgattatttcttcatggtatcatttaatttgtttttgtatccactattcttggaatcagcaatttctccaaaatgagatgcaagcgtctcatgaaatctgctcagtgatttccaagaacggttttgctttctcaatatagaaacttttcaaccatacttttctttctagattatttaaacatcgaatccgagatacctacatctctgccagagggctctgtacctgagggaagtactggctgaaccaaggacataattttaaaattctgaaggaagtgatggtcaacctgaagttctatacctaatcaaactatcaaccaaacttgagggcagactaaagattatttcagatattaggcatttattaaaggatatgtacttcttaggcatttattaaaggatgagcattaccaaacaagggaccaataagacaaagaaaaggaagaatgagatctaagaaataaagaatccaatttacaacataaatcctaaaatgacagctatgggctatgtatattaggcaaacaatctgagaggttggagcagaagaatggatgataactaaaatatactggaaactgcttatttttttctcagcactatcctgctcttctaagctctatcttgaataatgagaactgaaaacttataaactatgtttcctacacttcttgccaggaggtttttcacttagagcccacaatgaaagaatttgtacaatatttagatggcagaagaaaatgagaagccttgttctccagggacaactgagggcagatgcagtggattccaggtgccaaagacaactgacataagtagctgtggttcacctgcaattcctgtactatcacatttcttgaaatccagcaatgatttcccattggttctgttagtctgtaattttaggcattaattcctttctttttaaactatgtaatgtagtttctattttccttacctaacctcaagtgattcaggaattctttaggtaaaaatatagaagtaatggatcatctgatgcttgaatgatgaccattatttatatactcactgtactataaatatcaacttctgattttatttagattgtggtatacctatatttggaagatagggatagggaaaaatgcgtgtgagaaatatgatgataaagaatgatacgttgtaatcccagcactttggcaggctgaggcaggtggatcacgaggtcaggagatcgagaccatcctggcaaacacagtggaaccctgtctctactaaaaatacaaaaaaaattagccaggcgtggtggtgggcgcctgtagtcttagctactcgggatgctgaggcaggagaatggcgtgaacccgggaggtggagcttgcagtgagccgagatcacgccactgcactccagcctgggggacagagcaagacttcatctcaaaaaaaaaaaaaaagtgatactttcttaatttccataaaagaaagtctatatacagtttaaaggtcttaagtttttttaaatagcagcataagcccaccccctctccctttttttattttaggcagtaaggttgtcttaggagagtgagtcaaggaacgaggtagaggattgattttaggtaataaagagcttttcagcatcatcgattttttaggtagataatatcttactttgttaaaaaggaatttttaaaaggggttagcaaagaaaaacaaaataagaaacagacaaagttttaaaacaaacataaaagatgcttgtgaaataactgggaaaatggctgcaaatacagttgcaaaataatgacctgagtcctctgtgacattactccttctatatatatttatatgagatgctaaattacaataaaatgtgtgcttgtttttcatttggtatgcatagaaccaaatgaaggaagttgagcaaaataatttaaatttgtaatatacttagctatgatagcctaaaacatttttctctacatgagatcatacatgtcaccaggacttatgggtttaaaagatttcctcttcctcagaaagaacatatattttcatacagcaaaatcattagcagtgactctgtttatggatcctagaatcgaccagtttcccaaataactggtttattcgcatatgcaggtctgtgtgtctatcaaaacaggttatagattaaatctaactcatctggaagccactctttacctttacggtgagtatgcatgttcctctcaaatccattttgtgaggatctattaattaaatttccaggtatccaagtattttgttaattaggagtggtaacaggagtggggatgtcactgggttcccatgtaaaacaaacaatattagcttatattaaaagcaataatctggccaggtgtggtggctcacatctgtaatcccatcactttgggaggccaaggcgggtggatcacgaggtcaggagttcaagatcagcctgaccaacatggtgaaactccatttctactaagaatacaaaaattagctaggcatggtggtgcgtgcctgtaattccagctacttgggaggctgaggcaggagaattgcttgaaccaggacccaggtagcggaggttgcagtgagccgagatcatgccactgcactccagcctgggctacagagcgagactccatctcaaaaaaaaaaagaaaaaaaaaataataaccagcttaagacaaagtagactgtaacaatcagtacactcttttctctactttttcttatggaaaattcgaaacatacaaataaagtagagagaatataataaattcccatgtagccatcacctagactcaataatttttttattctgttgatcttcttctatctatttcgcattatacttttctttctagagtatttaaaaactagtctcagatatcatgttatctcataatccttgcattccaaaatgtagactaagccatccttgactattttggcaggaattaatatttgaatagatatttaaatcttttgaaatttaatatgtgaatcaattgctctggcataagaagaaatacatattaggtgttgtcatatatactcttcatggttcatacaaattcagaaaaccatttaagaaaagaactgtccaacctcaggtgtgaaccataaagctctttcagggcatctattctctaagaagatacaaaagtgctaaggaagcagaaaagtatagagaaaaaaaaagtgatctaggaaaagaatcatcaagggagtatagaaaatctgaacttagagataaacactcagatactctggatgcctaaaaataagactatcatagtagacattgttagggctctcctcatatcccttggcaatttcaacaatctcctgtagacttccatctggcagtatctacacatccatgtgcctgagggagtactggttagacttggaataattttctgaagttggtgtataaataccacagctccctcaactctctcagttgggataattatgtgttatattttgcactgtttccaaaagttatcctgtaggattaaattcatctggcagctggcttataaggagcccatcattgtttcccctttccctgttccattttcccacctccctactagtgtcaccagctagtgtcaactacttgcactggaattcctgtttcagcatctcaacctggggaaacctgacacaattactaaacaagattcctttcttgttcttttagatgagcaaaaaaggaaaagaaagaccttgtattaggtactttacaaaaattaccttagtaaacccttataatgataatgtgaagtaagaattatacacatagggaagctcagaagttgtgtctgtgatctcaccactgggatctgaattcagaaataaagactaggaaaagcaccagcgacacgaattcagtaaacctgaatttccatatgccccaactcccaagccaattttacccagtgttatttcctcaaagcactgtagtatttgaaattatcttgtatatccatttgtttacttattgtctctctctcccacccactttagaatggaaggtacataagatcaaggacttttgtcctcattggcatatctccagagccatgggtacatttagacacaaattaatattttctaaatgaataattcagaatgattcttaaaatcaaaatattttggcttatattttgtaactcatctttcccagattttttgcaactcaatcccactttgctgattttccagaaacaccatgtttccttgccattccagtcacattcctccctccaggcctttccatttactgttccctctgcctagaatgttcttttcattagacagtcctcatggcttcttccctcacttcattcagatctcttttattgaagagacattattgctttcctttgtccttagtaattatcaccatatgacatacgtgtttatttccatgtctatccccactagactataagctcaacaagaggagaagattgtccacatttcttcactggtatattctcaacacttagaataaattttctagcatgtaacaggcactcaacaaattttgatgaatgagtggataggcacaatataaatttaaaatgtcatgatatcaacaacctccataaaattattttggttttctgaaataatcttcaaaagtaccaatacaaaatatgaaactgaaaagacccagttaaagttaagtggcactccatgcttaactgtaactgatgtccaaacagttggattctcctaattaaaataagacacaggacatggaatcaaaagacactttccagatctcaaatgtaagaaatcccagctactgtgctagacctctaccatgcgtatcatttaaatataaatgaaaacttcacacacatttgattaaatgtcctcttgttagttttagctcagttttgcagctgcaactgttaattttcaacagtttagtgaaaactgaagaataaagcccacttttcaaatggcatgttcttacagatcgtatagaggactgtcattctcatctcccaattggagcttgattgattactccttttccttatgttcattaatctcgtcaccttatcttttataccacttcattttagcagaaaggtaataataaaaccctcatccattatccttgtactcatctagtcaagcggaaatggttaataacatgctacaaattgaacttcaatcacttcattttctcctttgttgaatacacattaaaatatattccaaaagtgcaatctgttttacaggagaatttgtgttatattgctacagacaactaaaattaagtgtttctcagtttggttattaaatatatccaagtgctcttttaccaataatactaaaacattaactcattttattagggtataataatacaagagccttatctcttagaacacaaagacatctagactacctaatagtatgtgttatatgatagggtcatttatctttaaaaaaaaataccagtgataatttatgaattggtatattattacaaatgaaattgctatttttaaaagttaatttgtttacatgcaaccttatcttgaaatgcaagccctattagtgaaaaagtctataactgtcatataaaacagaaagagaagaatgggcatatacataaaatagactcaatgatttaagattttaaaagtataatcactgaaagaaattaaatttaatatgtaattagactagagttttcaaaagaaaaaagaaaaaatgacttctgaaattacaaaagatttttatgtacatcacaacaattgttgaactgatttctaatagtcttaaaaatactgagaggaaaaaaactatccttttgggaaaaaagaattttctactaatgtgggtaagtgtcttctatctatttataaatggacatgctcaccaactaactaaaaactagacctacagcaaatgttgaaaaacttaaccagataatcaaggcttattgtctattatctttctaccatcctgaaaaaaatgttcttctgaatctagataacaatgttagcaactgacaatatcaatatttgagcacccgaactctactacttaataaacccatctttttttgtttgtttgttttttaatttttttgagacagggtctcagtcacccaggctgcagggcagtggcaagatcactgctcatcacagcctcaacttcctgggctcaagcaatcctcccatcttagcctctcaggtaactagtcacatgtcaccacatctggctaattttttaattttttttaagagacagggtttcaccatattgcccaggctgttctctaactcctgagctcaagcaatctgtctccttgggctcccaaaggctgggattacagatgtgagccatcatgcccagccaaaacccatttttttttaattattgggaaagatacatatatatatctatttgcttacactgctgctgttgttgtttgaagggcatgtgtgtcagctatcaatttatcacctcttagttccatatttacccttcattatctgctctgaagtaatgaacctggatactttaagtatttctcctttgtagtagcatgacgttgttgagctttttcaacagacagccctggagggacgctgcaggatgaaagcagcttctttccccccattccagtgtgctcaactcatcgggcttccttccactcagacattagctaatgagtattaatactgagtgcctgaaatgatattttggcaagtttgcctgacctaagagtcatagagatcacagtggctgataagtcaatctccattccaccaccttctgttttatggcagaatgtgccataaaacaaccctacggccatcccatttggctcagtcatgaagatgctggattctatgatccacagacccacatcaagtatctctaccccagtccttgtcttttcctgttgttcaggatgaataccatatgtatttgccctgcctttctcagaagcaacaaaggatgaatgattaaaatgctgcttttaaaaagtgcattcctttttatccattaaattgtttcactataaaatatacacatagataatatataataattacaatgttatattttataagatcatttagtcaaggccttggtttttccagaatatagaacagtagtataccaaatgtatacattattgttcacatttaagactttttagttgtatacatatgtaactaacctgcacattgtgcacatgtaccctaaaacttgaagtataataataataataataataataataataataataattttttttaaaaaaacactttttagtacatcatccagtattcctaatatacaaagctaccctcctttttgcatgatttacacgttttgctttagtggaaagtttttaagatacttgtcatgttaggcatgaattacctgtcatagttacattatgttctccacaaataatccttcttttctgtaaactgtacaaaacaaaacaatattacaaaaacaatagcctaaacgtttttagatacttttttcctacaaaaagctgtaagaacatgctactaagtttatattacatatattacatagttccttttaaggagacaggaagaattaacatttaatattatttagcatgtgaaaattggaaaggaatcaatcaataagcctatgtatgcaacaatttttgtttcaccctctaaacattcttaaactatatcagatgccattgtctataaaaaatgaatttatcaatttaatgaggatttaggcagattagttgcttaatgagaactccagctaatgtgacagaggttttgtttcagtgctgacaaaatcagtgtgataaaactgtgattaaactgatgagagtacatttctttttaaaatcattatttcacataattaatgttaaacagcaatatataatcatttaaaaatattgtttataccttttatattttaatgtttttatatttagacataatagtttcaatattttacaatcctgagccttctcctcttacctttatctattgtgtattattttgttttgttttttagagatagtgtctttctctgctgcccaggctagaggggagtggtgcaagccttgctcactgaagcctcgaactctggggctcaagtgatactcccacctcagactcctaagtagccagaactacaggcccatgccactatgcttggctaatttttttctttattttttgtaaagatggggtctcactatgttgcctaggctggtccctaattcctggactcaagtggttctcccactttggcctcccaaagcactgggattacaggcacaagccatggcagtcaacctactattctgtttaattgtttcactcatttttcttgattttctctccttctttgttctctttctatatttacacaaatacataatatcaccatttaaataaatgcaaattacaattcacgcaagaacagtaattcccaatatattggctaaaagaaaactctattatcaaaagctttctccttagctgggtaatgctttggttcatagattagagaactatctaccttaaaacaaagactttttaaaattgaagatagaaaacatctgtaaacattctacattttcctatgttgtttcctaaataacctaaaaggtcaataagaaagagatattttgtactataaaatactttcgttcttaagacaagggtgctgtggcccatacatttgctagtattcctcttactgactctcagaggtggtgtagttaagaacagaacttcgacatgactaatgggggtcagcagatattacgtgtctcctcatatgttccaatatgaggcatacatcatcaactatagttcacctaaaaatatttaccttaatataaccaagcctttacatttaacttccagcttaaaggattacaaagtatcttttacaatataaataactactataagcaagtaaatagataagtgcagaggtaggacactctacagaacaaatgcactggtctcctcaacaagccagtgttatgagtaaagaattgctctgaaatgaaaaaaagacttaacagacagaacaaccagatacaatgaggattcccagattaaattccactttgggcaaaaaagttacaagggatatttttggagaaagaggacacatttaaatattgattaggtatgagataatattaaggactattattaataatttcattagataatattgttactttggtctttgtaggaaaacatattgttttaaagacatagaaaagtatttaggaatggactgttgggtaccaatttattttaaaacccttcagcatttcacttgtggtagtgactgaatttcaattgcggtcgattttggggcacaaaggtggcttctggtgctggtaacattctgtttcctattctagttgctggttttatcattctgtccactctgcaaaaagttagtgtgttgtacaattatgtgcagttttcagtatatgatgtatttccatgaacagtataaaacaaactaatcagcgttaaaaaatgtttacatgaattaattttaaaatgcaacagctctggattaaattgtttggttttcaattttggctctaagcctaatcaagaacacaatcccatttataatagacacacacacacataaacaaatgaggtgaaaggtctccacaaagagaacaacataacattgtgaaaagaaatcagagatcacacaaacaaatggaacaacattccgttctcatgaattggaggaattaatatcattaaaatggccatactacccaaagcaatttacacattcaacactatttctctcaaactaccaatgtcatttttcacagaattagaaataactattctaaaatcatatggaagcaaaaaagaggctgaatagccaaaacaatcctaagcaaaaagaacaaagctggaggtttcacattacctgacttcaaactatactataagactacaataaccaaaacagcatgatactggtacaaaaacagacacatagaccaatggaacagaatagacaattcagaaataaagctgcacacctacaacaaaagttttaaaaagttgacaaagataagcaatggcgaaaggactgcctatttaataaatagtgccggtataactgggtatccatacacaaaaaatgaaactggaccactgcctttcaaaatatacaaaaattaactcaagatagatgaaagatttcaaggtaagacctcaagctataaaaatcctaaaagaaaacctaggaagtaccattctggacattggccttggcaaagaacttacaaccaagtcctcaaaagcaattgcaacagcaatgtcaacaaaaaatgacaattgagatctaattaaaataaagagcttctgcacaccaaaagaaactatcaaccaagtaaacagacaacccatggaatgggagaaaatatttgcgaactatgcatctgacaaaggcctaatatccagaatctataggaaacttcattcaacaagcaaaacccaaagaaccccattaaaaagtgaacaaaggaccgggcacagtggcttacacctgtaatcccagcactttgggaggctaaggcaggtggatcacttgaggtcagcagttgctcaggaccagcctgaacaacatggtgagaccaccatctctactaaaaatacaaaaattagccaggcatggtggtgcacgcccgtagtcccagctatttgggaggctgaggcatgaaaattgcttgaacccaggagggggaggttgcagtgagccaagatcacaccactgcactgcagcctgggtgacagagcgagactctgtctcaaaaaaaaaagcgaacaaaagacattgaacagaagcttctcaaatgtgtccaatgtgcaaccaacaaatatattaaaaagtgctcaacatcactaatcatcagagaaattcaattcaaaaccacaatgagataccatctcacactagtcagaatggctattattaaaaaggcaaacaaataacaggtgctggtgaggctgcagacaaaagagaacttttatacactgttggtggaaatgtaaattcgttcagccactgtggaaagcagtttggagatttctcaaagaactgaaaacagaactaccatttgacccagcaatcccattgctggatatatactctaaagaaaataaatcattctaccaaaaagacacatgcactggtatgtttattgcagtactattcacaatagcaaagacaaggaatcaacctagatgcccagcaacagtggggttgataaaggaaatatggtacatatagatcatggaaaactgcacagccataacaaagaataaaatcatgtcctttgcagcaacgtgcatgcagctggaagccatcatcctgagtgaattaatgcaggaacagaaaaccaaataccacatgttctcattcataaatgggagttaaacactgggtacatatggacatacagatgggaacaagagagattagagactactaaaggggggagatggggaggggtaaaaggggtgaaaaactatctactggccaggcgcacacctgtaatccaatcccaacactttgggaggctgaggcagaatgattgcttgagcccaggctcagtgagccaagatcatgtcactgcactctagccggattacagagtgaggccctgtctcaaaaaaaaaaaaaaaacaaaaaactacctattgggtattatgctcactacctaggtgacaggatcattcctaccccaaacctcagtgttattcaatattcccatgtaacaaacctgcacatgtagcctctgaatctaaaagttaagggttttaaaaacctttaactttttttttttgttagacagagtctcattcttgtcacccaggctggagtgcagtggcatgatctcagttcactgcaacctctgcctcctgggttcaagcaattctcctgcttcaggctcccgagtagctgggactatgggcacgcaccaccatgcccggctaatttttgtatttttagtaaagatggggtttcatcatgttgttcaggatggtctcaatctcttgacgtcgtgatccgcccgctgcggcctcccaaagtgctgggattacaggcataagccacagtgcccagcagtttgtttaaattgaggctgtaccatgaactgggtaagttattaacagccctgcacctcaatttcttcatctgaaaaatgttagccataaaaaattttttaccccaatttctaaactaggctattctaaggtattttcttctttcacttgccattttttgtgtgtttatattactttccttattcagtccaaaatagatttccaatgccctatctctaaaagttggaaacattctgaaataaatctaaacaagagttttcaattgaaattaataccagtagtcttataaagtcgaaaggagattcacagtatcaacatagtcttaagcgcatcttaaacaatatatctgctctgaatagttacctggaagtggcagtgattgtatggcctcactagaatccaacgtaacatataccagaatattatacattaattgacctgaacactactcagtgtgctaagtgatctggagaacagtaactgagatacatatacatctagaagttcacaaagggaagtagaaaaggtgttgccgagaagactattcaagattactttgtcagtactgaaactgtatattttatcagaaataaaattctaggaatatcttttagagtatcagttcgttaaacatcagtaaaggaataaaaacatttatgtactcacaaatatcgtattaatatttgaaagttttttaatgtttagtattttattttttaatttttatgtatttatgtcatttgaagtatactgaatagcttttaaattaaatcatagctaacttactttccgttatatgtcttgctacttaataaagaatatcacaaaatacctaggttttacggacattttaataatataaactgaccattatttttgcattctcgaaaacagaccataatactcttaggtagtatgctgaacatttgggatgggtttttatgggtgttgttgttgttgttgggagacggagtctcactctgtcacccaggctgaagtgcagtggcgcgatctcggctcactgcagcctcctaggttcaagcgattcaagtagctggctacagatgtgcgtcaccacacccggctaatttttgtatttttagcagagacggggtttcaccatgttggccaggctggtcttgaactcctgacctcatgtgatccgcctgcctcagcctctcaaagtgctgggtatacaggcatgagccaccagcgcccagccaacattttgaaaaacaataaaaatgaagattttaaggcatgctattgttttacaaaatagcctggcttaattttgtagttgtaaagtaactcaacaaaaagcaattgtaagaatgtttataatacattccttaataacaatagcaacttatactttcttaaaagtgtttttcctttataactttcaaaatgttactattacacaactcagtgatatacatgtgtcatataagttggtgcaattatctagcagaaatacagccacagaagctaagaagggccctgtgtcagcaaaatcaactttaaagaacatcttgcttagaaactagagagcataaactcaaaatttaaagctatttttgttgctgtaaatttttaaccatatagatgcaccattaaacagcaaaacttttctgattttcaggatgaattttataatgctaatatagagcagcggaaatcataaccattactgtcctcaaaaaatggtggctttatcagttctaggaaaatttacatatgagtaacagaaaacctaactaaaaaatgttgtaggcagcttagattcctttcttctcaaataacaaaggtaaacgaaagttagccagttactggatttagtcagttcaatggctcaaatagtataaaggctcggggttctattattttcttggcttgttccacgtattatgtttaagttccagggaggaagaagggaaaggagaaggataaagaccaaagagcatgactgagctgagtcagctccacctataaaaaggtttcccagaactccaacccagcttctacttatctcttgctggcaaaaaatatacctaatgatcagtcctagcttcaaggaaagctggaaaaactgggacaggagaaggaggttaagctggaacattggttcctttcaaaattcacagtcctatcagttttcttaaaatatatttctgaaactactgccatccaaactacttcatatataacagttcttaagaacatgccaaatatagacatttctcctctttgaaaaaacacctaaggaaggaaaatattaaaaaatagaataaatgattttttaaaaggtatcaatttcagaagtttaaatacatttttatagtgtctagtaccgttttatgctattttaatgattcaactatatactatctacagaagactcactttataattcatttatttttagagacagggtcttgctctgtcattcaggctggagtgcagtggatgcttccttgaacctcatagctcgctgcagccttgaactcctgggctcaagtgatcatcctgcctcaggcagcaataggtgcacactatcacacctggctaatttaaaaaaaatttttttttgtagaggcagtgtctcggtatgttgcccaacctggtcttgagctggtctcaagcaatccacctgcctcgggagactccatttagatttaaagacagaaataccttgaaagtaaataaatggaaaaatacttacaatatttactgcatatattgcatactaatatgtaaaattaagcaataaagcatatgttatgtctgaatcatgcattgcattttagaatagtattttaaaatttatagtacttattaaccagctttttacttttgaaatcaatctcaaacaaaaatgggttcattgcctcacaagtgtctctaaaccttgctcctcccctatcctctggtttcctgcaggcaggcagtataaccaatgggtaagagcatgaattctggaattggactacctgggttcaaaactagctctagcaatgctgggcaaactaattaatttctcttagctcattcagctataaaacagaaataataattgtaagaattaaatgagttaatgtatataaaacttacagcatatcacacattaaaagtgtcatttcttgttattgttatgaccttttccttcatttgtgatacatgtattaagcacttaccatataccagacattgtgctaaatattagaaatttgggtatttgggttatgaccaaatcagacataaactctgtcttgcacatatcaaaaatattaaacatgattttaccacctttttattactataaaaagtgaatactgaatttgttttctgcagctaacgagaagaaatcaataaaggaaagttaatataaacacaaagcaatgaaaatatttataaggcattgatgatgctagccagttcctgcttcctgtaacacctagctatgaatgttcttaaaagacaaatccagaatcgaaaaacaaactcaatgatttaaaatcacccaatcttcagaatttctattccatataattatgaatctgataatgacacatccataatcatacaaaaaaattttaaggtttcatagcaaacttcaagaaaattttagatagtctggtggtactaaaaaattagaccaaaataattttataatgaggcttaacattaaaatacaaaaatgcaaataaattgccatctttattaccaaaaacataagtgtcccaaaattcaccagtcccccacaaaaaactagaacacatatttattaactcaaggggctttgctaattatgtaaatgtctatcttttctacatgtaatttcattcaaacttcctctctttcccccaattaacgatcctgccaaatgttgggacttgaaaaggccacagctttatacacaattaacagtcaaattctaacacaaattacatgtcattcttatctctgtatacacattgaactcctatatcttgttgccaagagggagcttgcactagggaatacatcctgaatttgtttaatgtccaggaataacatttcacacttagaaaggagatactatccactgccagctatgtgaactgaaatttgccatgtcctatccttttcattttgttcaaataggtagtttagaaaatgagtaactatccacttatctgttttaaccaaatattttcttgacgcagaagaggcaatcatgatctttggttttctttagacactttttaggatgattacagaaacttttatgaatggtaaacttattttctgaatagaaattggggaactatcatttgacacataatctcactaccagaaaaaatatttgcaattggatcaatcccagaaaattagatttacatatatggtcattatatttatgattgcttcccgagaaaaggtttcaacagcagcaacactagaaataaccaatttcttattcagtaagtatatgagacaatcatcacatcaaaatagtcagacatgtcccaatcttttgaagtatagcattttattaccaaagtacctcaacaaataccagtcatttacatactaaaagggcaactaaaatatattttatatatattaatatgtacatgttatgacctaaagttatgaaagcttgtaaaacacagcacttttagaatacaaacatccccaaattaaacttttaaagaaacaaatctgattgggtttagttactagcttactgctcttcagtagtctccactgtccttagaatagtatcaactggcatttgtctacctgtccagctttgcctcctacaatctgcttactaaaccctcagctccaaacataattcttcctttctttttttttttttctttcaagacagagtctcaatctgttgcccagactggagtgcagtggtacgatctcggctcactgcaacctcctcctcctgggttccagtgattctcatgcctcagtctcctgagtagctgagattacaggtgcatgccaccatgcccagctaatttttgtatttttagtagtgacggagttttgccatgttggccaggctggtctcaaacccctgacctccagtgatacacccaccttggcctcccataccataattctttctattcctccatctcaacaaactatctctttaaactgacatttaccctaagcctggaatacaataaccgctcatctttcagttcacacttcaaatgtcgtttcctcaatgaagccttcctttaattcccttctcctatccctgacccccaaatagattcagtgcccagatatacatttccatgctactccacacttccttgccacagcaatttctacagtatattgaagcttgttgttcaccccctgttggcatgtaagctctgtaacattaagaaaaaccatgtttgtcttgctcactattgaattcccaaggtctaaacatatgggcctgaccctcacaccctcatttgatttctaaaattgggcttacatatatcaaattaaggcagggctcatatgcattgcaacattcagttaaaatactctcttccatcgttataaattccttcatatgaatataaaatgttctgataaccaaaacaaacaagaaaaagtgaaaaaattgcaatttgtttctacactgccttcagtttcatgtggtgaatctggagtcagaaccctagatttgacttcagattgtatcgcctgttacctatatgatgatgtgaagtgcttaacatcacaaagcctcatattcctcttctgtaaaatagaaaatattaatgcttgtcccacaaaccttaaagagctgggatctattaataaaattatgctcatgaaagcctttaaaaacgatgaagcatttcataataaaatgaattaacatctttgttattaataccataatcaaggtaatctcagttaaaaataatgcatacaaattatttcagaaaaactttggcatatatatgagctagaatgtactagttaaaataaatacaaaagtttaacctcaaaagaagattacaaatcaattgtaaaatacattccaatattctaagatattgttgctacaatctcagaaaattttactcctgaaatttcatatccttcgtgatatctgaaacctatcagttaaattcattattaattcttttattttacttattgcactttagaatcccatccagggaatctgttattattctgagaccacaatcataattctttttaaaataaaaatgtgaacattaagcttaaaaaaaataattcgcaacttaactctgtggtaaacaggtgaacaaaacaacaattatataatatctaaaaccattttatgctttaaaaataggtttatatgtactgaatactggctaagataggaaatatttgatttcaaatttgttaagaatttaaagacataaaaagttagattagaagttatcttaaaacaacaataaggtagtcattaaaaacatgatcaaacaagaaaacaatttcttttaactcatgctaggaaagttattcaatattctattacttattagagtaaaaataatcttggtctttgatttttgagtgttaaaaaaccaaacttttccaaaattcaacttctgatgcaacagctaattcagaaaagaaaaagtttttttttttctttttcctatccatttgggctacatgattctaaaattacaggtatagtcacaaagagcatatgcttcccccaaagctctgaaggcatgtaagaaactactgtagttaaagcttgaacaagcaagtcttttttaatccacatttttcatatagaagaaagatttgtgtattttgcaaaagtaatgctattgcgatattacgactttgaactaaagctctaaaatcatactattcaactaaaggtttctttagcaatattaacatggccacgctgcacatgttacttttagcttctttgtgtacaacaaactgcattcaattggtgaacaaatacaatgtttagtatcatatttaaaaccactattcaaaccttttcttaatgctgttatcagttttccttttgcaacaattttgtgtataaaaataaaagcactggatttttattagcgctgccccttctttgttttgctccactctgcaaagcccttttgggacactaagcctgcatttaccataatacggattaaactttctttgtcccattgcacaaggtttgttagcaggttagtctttttacacttttcacaggctgcctgcagcttaccctttaggcctcactcaaaatacttctgtggatttacaaaaataccagagtggtcttggggttaattggaagataagtgcagtctttaacatagagactcattaaacatttagccttaccacaatccactatccttgaaagagaaaagttctagagacactttaggaataataacacagtaaaattgttttaaaaaatgacgattagttgtttcacagacttggaaaaacttcatttaactaccccaaaggtgatatagtagaacaaagcaatgtccctggtcagctctctacattggttttaatatgcattgatcatagaggaaaattgaacagattttctaaggaactaaaaggcaaaatcttccaaccttctgttgggaaatttaaagtaaaaactcaactgatgggttatgacagataatatttatttgtaaacaaaacatatttaattctaacagtttaactttgttgatttaaattttacccaagtaaatcacatcaaacatgtctattagagccaaatgaaaaatttataaaattcacccaaaaaacttagaaagtatttaaaaatttaagttccttctttaatttctaaaatacatacatatacacaaatatacacacttaaaatgaaatctgaaacctactcattggtattaggttattttttagaattatgcaagcagattgttaaacagattaacttttccatccccttacctccttccaacactattactcccacacaaaaaggaaaaaagaaaaagaaaaatgcgacaaaacacacagacacttgaagtaaaggattagacatatttgcccaagatgcagataacaaaagcaaaagtgaagaaaattgaagagacagccaaacttcagcaacaaaatggttaaagaatctgaagtattgttcccgttattcttaaagtctgctatattgtagacagcgcaaacatcagacaagttaagattactgaccattatctccttaattttctccgctttccctcacattccctcttgctatctgggcaccatttttctaaagctttatttctggtaagaagtaaactttccctaatccatctattatggaacctttaattggattgggagcagggtggtgtataaaatagcccctattcactcaaaaggactgtagttttagagacttaaaggagaaaggtattgtgaaacaaaatcctcagggaatcaaggattaaaatgtggctctcctaaattcatcaactccaggacacaaatgaattgcttccttaaacaggtaactttccaaatacatggcatagcaaaactgaaattaaaattataattttactttaaggaaaataatgcatttacactaataatttttcgctttataaatgacttttacttgctgtttcttcaactcagaattacaatgccagggaacaaatggaatgccttaaacatatttatttatattttctctacatacatattttccctgtaaagtaaggagaaaagcaaaagaatatgctttaatcaattaagtcctgtacgttatatttgtgcagccttaaagcagcaagcactgccataatacaaacatttttttcaaagtaaaaatacatttcgttcttatcagatagtgtcagatacataataatcagcagtcactcttcttccctcaatcagttatcctctctgttttcttcataaacatccccaaaccactctttgttaggctgtagtacttttgtcttctgtcccgccacagtgcacacccaactatttgggatgtcttcaacagtaagatgaggatacagctcatactcagttattctcttactgaattaaatatatttaaagtgccaaacctgctatctaaagtaaaatgaaatccagaatgtatctaccaactctaaattaatctcgcaaatgtctacatactctaccaaaacaataggaaactgaggaagagaaatgttaggagagttcaagattctaatgtaacacttaactctgcatagtttactagtctatattaaaatataaaaatacatcaatattagttatttacctaatggtgctgttaaaaacagatttaaaaaaaaatttaagaaatgcaattaattttaagaaaaccctcaaagtatcccctctgttttggaacctgtatcacaactcaataagtgctacttattattgattgaacccttactaattgtctgacattgtgctaactgctattacatgaattatctcattttattctctcaacaattgtatgaggtagttgctattacctgtttttccacaaatgaggaagctaagtttttaaaatttcaattaaattgtccaaggttacatagctgcaaagaaaataagctctgtgaaagcttttcattactatattataaatgtttagtataagaaagcaggctcatttgccaaagtcaatctgccaaaaaataaatgtgcctaaattatcaaaatcacctatgttccaaccgtaaatatttaaagaatattcttcttgaatgtattaaatctataactatattcttctaatgaatatattctaagatatatttaatactttttaagcaacattttaagaaccactgtttttcaaaactaaagtcatcatagggtagctctgtcctattaccaatataactaaaattttaatgtttcatatgacattttttagttcgtactgatttctatttgtatattttttctatttttctaacattctgtcatgtagaataattgttgctttattttattttattttattttatttttttatttttttttagatggagtctcgctctgttgcctatgctgcagtgcagtggcactatctcggctcactgcaagctccgcctcccgggttcacaccattctcctgcctcagcctcccgagtagctgggactacaggtgcccgtcaccacgcccggctaattttttgtatttttagtagagacagggtttcaccgtgttagccaggatggtctcgaactcctgacctcatgatctgcccgcctcggcctcccaaaatgctgggattacaggcatgagccactgcacccagcctcatttgtcacttttacctatttataaagtattatatcagttgagaattattttaatacttttcaaagtgtatgaagtcttatttgaacagttttcatcttgttttcataacaaccttggagggaacctccatttgtctgtcccaaatcactacagttgaagctgaagaaagcttttttagaggaaagatggaaaagaaagcaaatattccagggagagattctgattcctgaaagtattaggaatgagtatcagggttgagtactaaatggcactatcagagaaagaagatgagggaactacgaatcctggccataggtttcatagtctcttaggccacacctcttaggctcttttaacccatacaacacatagtgtgtaaataaaaaaatacaaactagtttagggtaattttaatatagcagagaattcattttctgtaaatttagctcattagttttagcaaattcctagcacaatggcatgcatatttagtagggcattaaaaatatgtgtggaatggatatattaaaattttatgtaaagtaaaactttaaacactgtattttgatttcaaaaataatctttaattggtcagttaaagtattttaaataaatatatttttaaagataacatgaacatgcatgctccactttaggggtagctaaaacaacaccccaaaacaacctcatactaaaggattattgaattttacatttaaaaaagagcaactatagggaaagaaccaaaaatggatctaggaaaattacaaaatacagcaagtatcttaaaaatgatttaattattaaagcatatttagaatacaaatgagtatttactattttgagagcccattaaaattaagatacccaactattctttttctctgatgccattttactaatagctaagtgtgtatataaatatctcagtcactggtatgtaaatgtcataataaagtgtaatgtatttcatcacattctatctgcacttatgcttccttatgacttcagctaagtttctacacacagtggtttagttttaaatggttgtccccaaaatatgatgagttagaaattatcttgcatttgtgtgctcattcataataaatcactgtttttaggcctcaaataacatcaggtctctatttgctgcttagtaagaggcaactaacatttcacggaaaatagttctttaactaaaagattatatcagggcttcctcatataagattactcaaattttgtataacattggatctctgttgtgttataaaatatttggtacaaaacaaactgctatggtttgaccatatcccccaaagttcatgtgttggaaactgaatccccattttaacagtgttgagaggtggggcctttgggagtgactgggttatgagggctctgccttcataaatggattaatgtgattattgctagggagtgttaattatcacaagagtgagttcctcataaaagaatggagcttagacccctcttgctctctctgtctcacatgctcacttggtcttctgccctgggatgactctcaccaggtactggcaccatgctcttagatttcctgcctccaaaagcatgagccaaataaattctattctttataaattactagtctctggtattctgtaatagcagcagagaatggattaaaaaactaatgaaatgaatatgtaaattagcatataaatatatcaacttgtgtatggataaacatattcaacgacagctacataaaaaagactaaaaagcaggagtggtggctcacacctgtaatcttagcattttgggaggctgaggtaggtagatcacttgagcccaagagtctgagaccagcctgggcaacatagtgaaatcctgtctctacaaaaaacacaaaaattagccaggagtggtggaacatgcctgtagtcccagctactcaggggaggatcactaaaaccagagaggtcaaggctgcagtaagccatgatcatgtcactgcactccagcctgggtgacagagcaagaccctgtctcaaaaaataaaaaaaaaagcaaaaagcttaggaatacaccctgattgaaatatatgatactcataagttatacatgagagagccattttaaaccactaatgaaaatgactgttaagtcccatagaaaagtctattaaaatatatgtatgtgtatatatattttttacacacacacggatatacatataatttcttacatcatacttaccctttagaatagcagtcctcaatcattttggcaccagaaactgatttcgtggaagacaatttttccacagaccaaagtggggtggggggtaggaggtatgattttaggatgaaactcttccgactcagatcgtctgacattagagtctcataaggagcacgcaacctagttccctcatatgcacagtacacaataaggttcgcacccctatgaaaatctaatgccacagctgatctgacaggaggcagagctcaggtggtaatactccctcacctggcactcctctcctgctatgtggcccagttcctgacagggaaactgggtagggaacccctgccttagaagacagaatacaaaaatacagtttatgccaagatccaaaaaatagtcaagtcagaaagttaagaatattatacttttcataccaataaccatatcctgtacaattctcctgtacaggagtgtatcttgtacaatttctcaaaagaagacatttatgcagccaaaagacacatgaaaaaatgctcaccatcactggccatcagggaaatgcaaatcaaaaccacaatgagataccatctcacaccagttagaatggcaatcattaaaaagtcaggaaacaacaggtgttggagaggatgtggagaaacaggaacacttttacactgttggtgggagtgtgaactagttcaaccactgtggaagacagggtggtgattcctcaaggatctagaactagaaataccatttgacccagccatcccattactgggtatataaccaaaggattataaatcatgctgatataaagacacatgcacacgtatgtttactgcggcactactcacaatagtaaagacttggaaccaacccaaatgtccatcaatgatagactggattaaaaaaatgtggcagctgggcatggtggctcaagcctgtaatcccagcactttgggaggctgaggcgggcagatcacgaggtcaggagatcgagaccatcctggatagcacggtgaaaccccgtctctactaaaaatacaaaaaaatagcctggcatggtggcaggcgcctgtagtctcagctacttgggaggctgaggcaggagaatggcatgaacccgggaaacggagcttgcagtgagccgagatcatgccactgcactccagcctgggcgacagagcgaggctctgtctcaaaaaaaaaaagaaaaaaagaaaaaaaagaaaatgtggcacatatacactatggaatattatgcagtcataaaaaaggatgagttcatgtcatttgtagggacatggatgaagctggaaaccatcattctcagcaaactatcgcaaggacagaaaaccaaacactgcatgttctcactcataggtgggaattgaacaatgagaacacttggacacagggaggggaacatcacacaccagggcctgtcgtggggtggggggaagggagagggatagcattaggagatatacctaatgtaaatgacgagttactgggtgcagcacaccaacatggcacatgtgtacatatgtaacaaacctgcatgttgtgcacatgtaccctagaacttaaagtacaaaaagaaaaaaaaaataacactccctcacctggcactcctctcctgctgtgcagcccagttcctaacagggaaactgggttgggaacccttgccttagaagacagaatacaaaaatacaatttatgccaagatccaaaaaattgtcaagtcagaaagttaagaatatcatacttttcataccaataaccatatcctgtacaattacacacagacagatggggggtagaaggagtcaaatcccacttctgacaccagattgtgtcaacctaaaaatagacactagagaaatttgtctccaaatatgttgagtttgtttgggaatgacaaatgaggattatgacatagaatggcaagccaccggtgcatctggtgagagaagggtaaagggaagcttttattagcccaaagagattcaagtaaactacttagaaacagagttcactggttccagaggcttaaagtcagagttatcatcagttcattggtgaagctgctattactggtcaagggttcatttaagagcatcttctctgaattgctatagttctaaaggatgtctagtgataaaccttgccaaaactagtgagaaaccttgctaaagcaggagatacatgcaggacatgaaggagtttcttgtgggatttctagaaagtccttggaaatcattcttatctcagatatataagcaagagcctcctctcctttctgccttcctgtaccaattttgccagggtctgacaaaattgatttcatccccatatctgtaactttcacaggggaaagaggggtaagatagttaaattaaacagagtccctcaaaaatcacccttcctttcttccccttaatttcaaagagccaatttactttacatgttggatactgcgctggagcaagaaggtaaaaccaggaagtaggatcagagagacaagagttactaagccaggacagaaatcagaaaccaaaatgtaataatctgctagagaattaggccataaggaatatctgttattttgcttattatctgtaagaagaaataaaattatagcacagtgatgaaagcacagtgaagagaaaccctaaaatgtttttagtaaaagaatgataaatgaaaattgacaataaagaatcaatcacaactaaagtatagaaagatgctaatatttctttattttacaagcttcatcaatatatattagtaaatataataataatcaaaagggcttttatagactcctttctgacctcatttctgcttactttttccaaaataatcttaaattcttcaacaaaacattctattaccaaggaggcttttcaggaatgttatctttagtataaggtattactaatccttcttaatgatgttctatgccacttataaaaaactcattaggatggcaaacaaaacagccttttgttacattaaactcagtgtttaaggaaaatagttacatattcattcattcaaaaaataagtattttttggaaagcctagagatacagaaatcaacaacaaaaagctgggggaaggaaggatacgatagttgtaagggttagataactactataaatctgtttcaatatgtacctttagcagtaatatttatagaaaataagattcaaaggcccttaaaatatctagggttactctttaaacaaggggaggaaggaatctgaaaacaggtgactccaatatcaattctttccatcaactctaggtcttgtggtgaacacttcagttgtttaattgtataaagaaatgctatcacccacacacatataatactacaatgctactacctatcctcaaattgtatattctactatttacttaaaacacagtagaccttaagactattctgttcaacccataacaattcaaatctacaatcaagttttagtaaagacagcatacttgcagctaatctatattcataaacgacactactatgctagctcatcaagtataaagaattaaaaacaattatatcttacaatacaaacagaattggctgggtgcacgcctgtaatcccagcactttgggaggccaaggtgggcggatcacaaggtcaagagatcgagaccatcctggccaacatggtgaaacgccatctctactaaaaatacaaaaaaattagctgggcatggtggcgcacgcctgtagtctcagctacttgggaggctaaggcaggagaatcacttgaacccagcaggcagagcttgcagtgagccaagatcgcaccactgcactccagcctgggtaacagagtgagactctgtcttataaaaacacacacacacacacacacacacacacacaaacaaatagaatctaaaaatattctctttttttgagacagggtcttcctttgtcacccaggctggtgtgcagtggtgcaatcgcggctcactgcagccttaatctcctgggtccagccaatcctcccaagtcagtagcccaagtagctacacagcaggagcacaccactatgcctggttaattctgttcattttttatagagatgagatactgttatgttgtctgggatggtcactaattcttgggttcaagagatcctcatgcctcaatctcccaaagtgctgggactacaggtatgagccactgtgctcagcctagaatctaaaaatattctagcaaaatatataaaaaataaataaaataaaaattttatgggacctgaaaaatgaatatggagaagccaaataaacatgctctccaatagcttttaatacagttaacacttatttttatacatttgttctaaatattcaaaaaactaaatttaaaaactatctgatggatggtaatcaaaaacatttttgtttgaaaacaaatcatattttaaacagcaactatgtttgaagtttaatatattcaaacatttgattatatggttaatgtctaaagctctacgaggaaccaaatcagagctattcttacttattgctgtaatctcagcatcctacatagttggcatactggcagataatcaaaagtgtttgtgaaatgaataattatatacatagttacacagaatgtgaataccttattagcctatttacttatttattttagtgccataactccaatctctttacttaaaagctcattgattgcttctgcattaaatgtgaaccttctaacattacaattttccctatgaaataagcataatattacttataaattatacaaatactgtgaaaatgcagattgacatattatatagtttggattttgaaaagacatctttatgcatgcacaaatgcaatttgtcattaaatttacaaatgttgtggtgtataaattggatacttcttcctaaatgtcttgcaatgttttaatatcaatgtgacagcaaaatctgcaatcaaaacaaggcctacaaggaaaatgcaacctttttaaaaatatgtagctgaataacaagatgtcgcaaaaatagggctgccacaattaccaaagaaagataattaaaaggacgtttgttatgtgctgtgtttcacccggtacccacatcttggtttctaatagcattcttcactgaaaagaattaaggctctccaaagtaatagctgattctagagctgcagaagggaagctacaagatgagccttgagcctcttgccatgtcagaaagtcagaaagtgctcaagaaaatgaaggggtaagtaaaaaaaacataagaacaagcttgaaaggcttcccactggcccaatctggaagaatttgagcattaaagtaattatgaccaccagtgaattattaaccattgaaaataagaaaaattcatgagtccatagcaataatagatggataaatacatggggaatgcagaagtgtataaagttaaggcataatgtcaactgataaagatggaagaagacgcgatatgggaaaataatcattttataaccatcatcactgtagagattaatacagggaagaactgttaagcggactccatatttcattcagatttcatcagtttttctctcaagcttttttttttttttcttgtcccaagatcccatccaagacaccacattatatttagtcttgatgtctccttaggcttctctggattttaatggtttttaagacttttcgtggttttgatgacctttgacagctttaaagagtactgaccagggcatttgtagaattcccctcaatttggatttgtctgatgttctcatggttagaatggggttacaggttttaggaaggaagtccacagaggtatagtgccatccgcatcacatcatatcatatcatagctacatgctatcaacgtgttttgtcactgatattagccttaattacctggttgaagtagcatttctcaggggtttccactgtatagttattttagttatttcctgctgctctgttccatactgtaccctttgtttttttgtttgttttgagacagtctcactctgtcacccaggctggagtgtagtggcgcaatcttggctcactgcaacctccacctcccaggttcaagtgattctcatgtctcagcaccctgagtagctggaattacaggcacataccaccataaccagctaatttttgttatttttagtagagatgggtttttgccacattggccaggctggtctccaactcctaacctcaaatgatccacctgccttggcctcccaaagtgctagaattacagacatgagccacagcgcccggccccatattgcactctttggaagcaagccactaagcagagcccacacttagcaggtggggagtaatggtccatttcttttggggggagtatctacataaattatttagactccttctataagggagatttaactcttctctcccctactaatttatttagctatttatttcagtatggactcctatttacttcatactttaggttataaaccaaaactaagttatttattttgttgttcaaattattttgactttgactattgagagctctttcatttggctcttgtgtccctttgacctaatcccattattctattcttcggacacttatgtatgttctggcactataatatgctccaggctcatcttgtgtagtgttggcctcagcaacagattcaaccatttctctggggagtcctgggttccttttattggagcatggtattagaaactaagacctgggcattgagtattctcattgctactggagtgtcattacttctagacaccctggtgaacaaagctaataaatgtatgcatatataccaatccatgtatacacacctattctttatttttctatgtatccatttgtatttatattaagctaaatatgatttaagactctgactctaatctagtaccacatgatttattctagccttcagggaggcaattttgatgagaagcaggatattcgcatggtatcattaaaggctgcttaataattacaaaggaaaaaataatacatagactagcaatatcagacaacatactgactggctgatcaaaatatcaccattgaagggcaggtagacatcctgtgcctctgtaagtgaaactctcagacagacatatcacttacatagtataacaactagacgtataacctgaatccaatcataaggaaacatcgcacaaatccaaatgaagactattctgttaaaaaaaggagagaactacattcttcaaaattggcaatgtcaagaaagacaaagatagcctgaagaattgtttcagatttagtcagactaaagaaatatctaattctaaactagattatctactagaagttaaaaatattggcagggcatggtggctcatgcctgtaatcccagcacgttgggaggccaaggcgggtggatcatgaggtcaagagattgagaccatcctggccaacatggtgaaaccccgtctctactaaaaatacaaaaattagctgggtgtggtggtgcatgctggtagtcccagctactcaggaggttgaggcaggagaatcgcttgaacccgggaggtggaggttgcagtgagactccatctcaaaaaaatatatatacattatatataagataaatatatatatttatataaatatataaatatataaatatttataatatataatgtatatttatatattgtattattttataatatatatttatataatataatatataattataatatatatattatataatatattatattatatattatatattatataatattatagattatataatatataatataatatataatatatataacattatagattatatatattatattatattatatataattataatatgttatatataataatatataataatataaaatataatatatataataatatataattatatataatatataattatatataattatatataattatatataattatatataatatataaatataaatatatatatatctatataaatatatatataaatatatatatttatataaaataagggacattatttcgtccatcgatgaaactcaagtatggatggcaggttaaagtattatctcaaagcaaatttcataaatttgattactattatagttatataaataagataacattcttattcttaggaaatacacactgaagtattcagggggaaaggagtataatgtgtacaaatggctcagaaaaaaagtggtgtgtgtattatatacacttgtatgtatgtgtgggtgtatttactaataacatacattatgtatgtatagagagagacaatgtcagagagagcacgaatgataaatgaggctaaatattaatggcaggtaaatctgtttttaaaaaacatgtgatccttgtttcttatataataaatgtgataagcatgtgatgagactgagccaacattagtgaaatatgggctttaaaatgttttccagaagcagttattctatcctgtgatgtcctctgtgaccaaaaactaaatgaaggatgtctttggaagactctaaagctaactggacaatttggaaactgacctctaactatactttgattaataccactggcgaatcattcatagggtatatacaaatacaaatttggcctcttgtttaaagggtttctgtagttcaatcattatgaactcctaactgatacttagtagaacagcatataggtccatatttataattcaaatcattggcaattaaaagcgttactatcggccgggcacagtggctcatgcctgtaatctcagcactttgagaggccgaggcgggcagatcacctgaagttgggagttcaagaccaggctgaccaacatggagaaaccccgtctctactaaaaatacaaaattagtcgggcatggtggcacatgtctgtaatcccagccactcggcaggctgaggcaggagaatcacttgaacccagaagtggaggttgcggtgagccaagatcacaccattgcactccagcctgggcaacaagagcgaaactccatctcaaaaaaaagaaaaaggttactatcagtaaatgctagctgaaactacagtaacaatttataaacagtaattctctactaaaatttaccaaaacataattctttctgagaacattattgtcacaagttttattacatgcttatattataaacctaccaataatatatttattaatatgataaatactaatttaaatctgttcttaatatgacaaaactgtgttattctaaaatccatgaagatgagctattccaaatgagaactttttctaaataactgaagggctagtaacactgtattccttctaaaccacaaaggtatagtgtggtatgcagaatgatgctccctcccaaagatgtccacattctattccctggaattcatgaatatgttattaataccataaaaggcaaagaggaattacagttgcaaatggaataaggttgctaatcagctaacattataacagagagattaacctggattatctgggtgagtccagtgtaattacaagagtaccttaaagtacaagagggtggcagattaagtcagagtgatgcaatataagcactcaatctgtccttactgactttgctgaattaaggaaggaagccacaagccaaggaccatggaaaacatctagaagttggaaaaggtaaggaaacgaattctcccctagacgctctagaagagaatgcagtcctgccaacaccttgattttacttctgtgaggcctgcataaagccattacttttgtggaaatttgttatagcagcaacagaaaattaatatatattctattttcttttctcttacaaaaagtgtaataaatataatttgatcttaaaacttcctgtagcaaatcattgcaggaatcaattcctgtactaaacaacaccctaccaatccctacctccaagcatatatagattcccacatctatgctttagaatataatatagttttcatgtaatcttttgataacagagatgttctatctattatctattactacccttcatctactgtgaatggctgtgctctctctaccctcagcaccactgactaccctagatgtccactattctctttcccccttagcctctccttcaattattttatatttgctcacacagtatctcctgagcttcttggctctagcagaagactgtccttaaatacatgaggctattcaatgccttttacccttgtctacaaatctaccaatcaacatataatattctgtgcacctcagctctttccattgttgctgagtattcaccggttgctttccagggatatttctccctctatttgcaataagcattaaatttttctttagaaggatatacatacatacatatatattcagcctatctgcaaaatgtaatgggacagcagcaggaataatgatagcgtagttacaagtatactctcattgctatgggcaactatgataatggcaatgtaagtacatattcattttctctatacataggcatcctcccacaccctgctatgtatgtatgttctcagtaaatgtttagaggacagaggagaaagtaaggtcttaacctcctggtatgcaaattataggaagaagagagaactaagcaaacaaacttaagttacataaagtaacagaagaaataatacatatttaatccataatatattttctaaaaatttatctgcattcaagacattaaaggccttcaaatatttaaatagtagaaacattacactgagagttattagacgacaaaattatgtcttactcattttcatttctctcatgcccacaattaagtttgctttgaaataattttttttttaataggggtcttgctctgttgaccaggctggaatgcagtgggatgatcatagctcactgcagccttgaactcctgggctccagcaatcctcttatctcagcctctcaagtagctgggactacaggcacacactaccacacccagctaatttttaaaatattttgtagaaatggagtcttactgcattacccagactgggttactcagggctcaagtgattataccaactcagcctctaaaagtgctgggattacagaaataagccaccacacctggttgaaataattttttttaaccttatgacaaatttgtatatgagcctaggtacacagacccttgcaatctaacaataagacttactagtattagcatcacataatcacaaggctgaaatattatagtgttagactctctttaaaatctatgtttttacacaaatcaataaatgtaatctatcacataaaaagaaccaatgacaaaaactatatgattatctcaatagatgaagaaaaggccttcgataaaattcaaacatcccttcatgttaaaaactctcaataaactaggtattgatggaacatctcaaaataataaaagctattcatgacaaacccatagccaatatcatactgaatggacaaaagctggaagcattccctttgagtggccctctctcaccacttctattcgacatagtattcaaagttctggccagggcaatcaggcaagagaaagaaataaagcgtattcgaataggaagagagaaagtcaaattgtctctgtttgcagacgacatgattgtatatgtagaaaaccccatcatatcagcccaaaaactccttaagctgataaccaacttcagcaaagtctcaggatacgaaatcaatgtgcaaaaatcacaagaattcctatataccaataacagacaaacagagagccaaatcatgagagaactcccattcacaattgcaacaaagagaataaaatacctaggaagccaactcacaagggatgtgaagaacctcctcaaggagaagtacaaatcactgttcagtgaaataaaggaggacacaaacaaatggaagaacattccatgctcatggataggaagaatcaatatcgtgaaaatggtcatactgcccaaggtagtttatagattcaatgccatccccatcaagctaccaatgactttcttcacagagttagaaaaaaagtactttaaagttcatatggaaccaaaaaagagcccatatagccaagacaatcctaagcaaaaagaacaaagctggaggcatcatgctacctgacttcaaactatactaaaaggctaccgtaaccaaaacagcatggtactggtaccaaaacagatatataagaccaatggaacagaacagaggcctcagaaataacaccgcacatctacaaccatctcatctttgacaaacctgacaaaaacaagaaatggggaaaggattccctatttaataaatggtgctgggaaaactggctagccataagtagaaagctgaaactggatcccttccttatccctcatacaaaaattaattcaagatggattaaagatgtaaatgttagacctaaaaccataaaaaccctagaagaaaacctaggcaataccattcaggacacaggcatgggcaaggacttcatgactaaaacaccaaaagcaatgacaacaaagccaaaatagacaaatgggatctaattaaactaaagagcttctgcacagcaaaagaaactaccatcagagtgaacaggcaacctacagaatgggggaaaatgtttgcaatctacccatctaacaaagggctaatatccagaatctacaaagaacttaaacaaatttacgagaaaaaaacaaccccatcaaaaagtgggcaaaggatatgaacagacacttctcaaaagaagatatgtatgtggctaacaaacatatgaaaagaagttcatcactgatcactagagaaatgcaaatcaaaaccacaatgagatactatctcatgccagtcagaatggcgatcattaaaaagtcaggaaacaacagatgctggcgaagctatggagaaaaaaagaatgcttttacatcgttggtgggaatgtaaattagttcaaccactggggaagacagtgtggtgattcctcaaggatctagaactaggaatttgacccagcaatcccgttactggataaatcattctactataaagacacatgcacatgtatgtttattgtagctatgtacaatagcaaagacatggaaccaacccaaatgcccatcaatgacagactagatgaagaaatgtggtacatatacaccatggaatattatgcagccacaaaaaagaatgagttcatgtcttttgccaggacatggatgaaactggaagccatcatcctcagcaaacacaggaaccaacaccacatgttctcactaataagtgggaattgaactatgagaacacatggacacagggaagggaacaacacacaccggggcctgttgggccatggggggaaggggaggaagagtatgaggacaaatacctaatgcatgtggggcttaaaacctaggtgatgggttgatgggtgctgcaaaccaccatggcacatgtaaacccatgtaacaaacctgcacattctgcatatgtatcctagaactaaaaataaaataaaaaatgtaaaaaaaataaaatctatgttttatattgatcatacacaacattgtagaatagattttacatatataattagtatacattttaaatatagagatttaacataacaactctcctggcaatttcagctgacaatttccatggcaaagtacaagctgcacacaatggaatcctgacttacttctttaacacataaaacacttaataaaatgtggaaaagctataccacctaagagttattctaaaatattttatagtgtgaaatacatttatatgtatgtatgtttaaatttactgaataaagacaccaattaagaaaattaaacccctaaaagctaactactattcacatactttaatttagtttgcttattcatttcaagtctttcttcattaatataagtttaacatatgtaaaatcatagcatagaggccaagcccagtggctcacacctgtaatcccagcatctggggaagcgaagataagaggatcacttaaacccaggagttcaagaccagcctgggcaacacggcaagatcctgtctctacaaaaaaaaaaaaaatgtagtcaggcatggtggtacatgcctgtagttctagctacttgagaggctgaagcagaaagattgcttcaaccctggagttcaaggttactatagcttgctactgggctccagcctgagagacagagtaagatcatgtctctaaaaaaataaaaataaaagtttaaaaatcatagcatggaaataaccttgtgcttttatcttttgaaatactttaagtataactaattttattactacataaatctaccatttcaattctcctttaagaaatctacaaagaaaaactcacatgatactttcatgacctctgaagattaaattatatctggattgtatctgaatcaaggatataagataattcatgaatgaataaaataggatttaataaagtaaaatataaaataaagactgatttcaaaataacaacttgttttaggactgtagcagactttcttttaattatagatttccaattaaactatttaggaaaagctatactttaattttaatcttaaaagttaaaagaagatcaagtaactgatactaacttcacattaaaatgtatttcactaatacaaatagtaataatgaccatcacaaaaattttagctaaatattaattgacctttatctgtatactttgactgtatttagttatttaaatactcacaatcaaaatatacagatacaacttttaaaaatacacagaaagtacttcagcacttatgaaatagaatgccatcatcttccgtataaaagctgaaatcaaatcagaaattgaaattgatgtcagtttatttctgagagcttaatatatttggtaaactgcttcctctttgataacagtggtttcagttttgtataaagactcattataagccacaatatttcctaagtataaaatatgcagcattttattaacttcatttccatcttttatgaacagcatggatataactaccaatcactttaaaacaaaatttaagtttcaagtatttttcatgtgatttgctacaaattattttggaaatttcctgactatataacattgtttagactgcaatcattttattaaaacttacctaaaatgataataacaactgctacttggccctccatgtatttaaaaaataaaaaacgtgagccagagatttccagatctctatatattatctgatcatgtcgcaacatttcagagtaggataacaagatgctcttttgaaaattaatgggaaaaaggaaagctttggagcttcttgtgaaaacaagaaaaagtgtaaagaaaaaggtaggtgatataacggacactatttaagttgtgggaaggcaaaacttacttaagaaactgtcatggacaactgcagacagggcattaaaaaaaggacaatggcactgatgggataccagtaaaaatctgatggctttaaaataaactgccaacatcttcacaaattatgctttactgcttctgagctctagcaaggtttctatacagatagggataataatagaatataagtcattatagatttgttgagaggattatgacaattaaagtgcttagcatagtggttggcacagaataagagttcaataaagtggtgtgttattcttatcatctcatttcaattgagttttgcaagactttcacatctctagaaatgtcatactgtaaatttgaacttgctgatagaaatctgttggaaaaagaagggtatcaaatttatcactctataaggatttatttagcatgtactatttacctaggcatgtggtgctaccaagtaaataacttgatatctgccttccaataacttttcacattggtaggttaacaaagggagaggaatacatggataataagaggaaagaacaaaaacaacgatatattagagtgtttaagatcaacggtaactgaagcatcagttcaaagagagcacttgcccgggcactgtggctcacgcctgtaatcccagacctttggaaggctgaggcaggaggactgcttgagtccaggatttcaagaccagtctagtcaacatagtgagaccccgtctctacaataaataaataaacaataatattaaatttaaaaaacaaacaaaaaaaataaatcagagagagctctctgtgtggcatccaatgatagatgtaagaaagctagcctggaaagacaaagacttcagattgggggccaatgtgaaacaaagttgaataggtaggactttaaggattttaaagcactatggcatgatgacagtgttttattctattcctctaagtaaaaacctgccaagggaactagaataaagcatgtatttaatgaaatcatttaattattaaaccactgacaattttcccttcttttattccctccttctttctataaatatttattgaatctccactgtctagcaggcagcacgtaagtggtggtaataaggaaacattaagatgaggactatacctggtttgaagagaaaaactttagtgtaaataatcccaaagaaaactaaccaagattattttatcagcactgcacctgcacttcattttcttttaagtaggtagactgttttcttattacaacttaaagattttagagtttcaagattatatcaaattaacacatttattacattttagatatatattcatatcaaaagcattctaaaactccatcctcaaagctctactcacttaaactagtattctggaactgcacatgagcattcggttttaaaatgccttacaattttgtcagatgccagaaaacaacaatgaaaaattaaccctggttgaaaaaagggataacttataagtagatttggttcagaagactataaaactataactaacttttaccaggcaatccaagatttataaaagcatgtaaccttgagcaagagacccaaccttcccatgcctcagtttcttcatcagcaaaatggtgacaatacctacctcaagggcttgctgtaaaaatgtaagagttaatacaggtaaaacacttaaaacattgtttgccacacagtaaatgtttcatatgtgctattatcattgtagatgcatctttccaacatctgcttggagaaaaaaataccgtgacaaaagaaaatggctctaaagagccttcagatgtaacacaatagaaggacaaacaggtagtcgcagaattgtgttagattagtgacctaagtgtgtttaaggaacaagaggtaaagcagaggtcacaatgtgtgtttaactttaaataaatatatgaaacaaggaaaattatattctagattttaaaaatgtaaataactttctattgctttacattgtccaaacaaaagctgtgttaataataaagagtatacttctgaatctggagtcccatcaatgatttgttcagcttgcgtaagtcacaactgattggacacagtccctgtgggcttgccatttcatccagactggacggttcattagtcataactactataactgtacagcagagactgcagttttatctcatcgtacatctttgatcaagctgcctcaattctgcttcatcagcatatgaagttacattattggagctttttattttccagtcggtaattaacagagattatgctttttatcaaaacatgtatttggtcttcacatttaatagtgagggcccagatctgaccaccatttgacctctgaaatttctaccacctaaataccatgaatcataaactgaaatccagaataccacagagaaaattaaacaaagaaaagaactgacctgtgttaaaaagcataagatgattgcacttatctaaattgagactaaccatatttgctgcagcttctcattaaacattaaatcgcacaccagaagaaaacatcatacatatttattgttttgcactgtcactttcaaaagactcataccacaattagtgtttctctcaaactataagctacataaagaaatttcccatgaagcctgaagacaaagtaatgtaaaagatggttcaagaaggttaaagaacagatggataatagatttcactgaacactaaagcataatacacttacttcagaaaagaaaatgttgccaaaacttagttcaaatataaaatactgaatgaaattgatgtgtcgggaatttttttttccttccaagttcttttggagaacaatagggggctaaaaggcctgtctcactatttttgcatctcactattttcgtgtgtaaagtgtccccactgtaggctgcatgaacaatcataatcgacagttacatgcaggcactgaggctgcaaaaatcccagagtaattagtgttgtctgaatgcaatgacatctgtgttctcatggttctcgagacatgtcaggccaataagatgtatatgaaaaaatatgacaagcattgcaaatgcccttctgaaaggtcttacactttaggggaaagctgaagaaataacacatgtcatcttctctttgtaagcaatatatttaagattacaagatctagaaagatcttttgagtcattcattctctttttgtaactataaagcatttgttcagaatacatcactagggtatgaaaaaaatctgttgtaagttggcttctttttaaaactttctcagcacatgtgattctgtgcagtgcaatgtaggtgcccattcctgtaagtgacaaaacagagagcatatcttattaacattccttggtttcgttaccttttaattaaaaaatattacctcttagtactgaacataaaatagttcaaaatttgtggttaaatgccttagaattatgtttgtatttttctaataatacagagtgtcaaattgactgtattaaaaagtctttgttttaagacaactaatgcttttgcttactgatgcctattactgaggcctctccctctatatgctgtagcagtatgtttgagcatgcacttgctccaagaaagacattagtcatcattaacagaagcactgacaccaaatctaagtgcctctccacaatgaccaagtggcaatcatctttctcttacactgtcactgctgattaggattttctttcatgaaaatttaatttgtacccctttctgcagcttcttttttttttcattcctgaaaaagcaacgtgttcaggagagattacagataaagcaaagaagctctacctataatatagctaatgatatagagattgcaagattctcaggtaaatcttttctctaatccaacagaaaaacacagattaaatcaatgattaataaacagaagaaaaacaatgattttaaaaggaatattgctttattgctttaagaatccataagcctcaaaaggtaactaattcaaggaatccaaataaaacttccctaaatattaacataatcccaagcttctttaaaactaagataacactttgatagttgccatctttcactaggtttcaaatttgtattctccattttgtaaacaaaaagacaggggcattcacacagaaatatcactataaactgaagaaaatacttaagcattcatacctttagtatgcattaacctactggttagttgtttttttttttttttttttttttttgagaaattttcagttgcactggacaaatgaaagtgattcatttggccaagcagggtactctacagctagatgatactacagacaaactctggttctgtacaatatcacaatgttaaacaagatatcatagcaataagttatttaaggaagtttttaaaaacatttacttttctgttttatttcaatctgtttaaagtttttttttttaatgtaagcatgtgatagtttgcaagggtcctggtacgacccaaactcccacttctagttataaatattatcatctcttcgtattacttaggtattataacaaaatagagattggtttaaatttaaattatcttgaaattattttatatcccttttagaacatatgtacttttagtcaaaacatgtaacacttttgtgtttacatgagcataaattgtatctttttaaaatgtaaataaccacatgaaatgctctgaaagcaaaaatcaacattatttctttgtaaatcagaagcaagtacaattcatcaaactttagtcattaaacgatccttctactcctattttattctgaaaaataatacagaaagtcaaacagcaactgcttagtgccatttacaaatggtttgttttttctttttttctatttaaaattggtctgcaattagaacatgtaagaggagattaggaattaaaatggattctgagaggcaatttctaactactgaacttttataacaggagtatctttgattaaataaggagctagtctaaactaaaagcaaaactgtaccataataacccaacttaattatctttgcagaatacatttataaatgattggctcatttctacctttacttgactaagtaaatatgcctcttaaattctcaaacattgaaaattctgattctcacagttgcacagacttatctaaatcaaaacttcaaaaagttacaatataattactgactccattgctagatccagtacaagttcaagtaaggaagtttagctctgtaacttccactcctcaacctaaacctccaagtcacttgtcagttaaaggttgggcgatttattgaccgcctctggatgcatactgtcagtgctgaaggaaatatgagggagggttgttgctactgttctggagctcattgataatgacatacctgcctctgtcacccattacccatactacaaactacttagacctaactgaaaaatcaatagcctacttgcactggttcctgtggctgcctcctttgattgtcagctcctgtctagggtcagcacttacatgaaaggggctgtgactgcctgatgctttcaggacaacctaacgatatgaaactagccaacagaacagtaaattctgcctccctgccctcctcatcaattaggctttgactaggcttgcctgtagaaacctgaccttttaagtttaggtgaatatggactagctgaacacaccattgccctcagcactgagccaggaaatctactgacaggttaaacaaaacagaaggttgtaactgtcataatttgcattgcactttcacgccaacaagggtgttatcagtaggggcaagccctggaacacacaactccagcacccttaagccacgctactcataaattttcaagtgaagtgagataaaacataaattcacaaatagcaatgcatttctcatctctcagtcttttaggtttgcactttgcaaacccacagagtgcccatcaacaactccttttggtcacctggcactcccattgcactaattagggactttcaatgaccataacacagaagtaaaaataacaatgcccatttaagacctattttagagagactatataatatagcagatagactgactggtatatatgtcaaaatgagaacaattagatctcaatatgctatcttttcttgcctcaattcactctctccaaaagtatccacaagcttagacaaacaataagttatcacgtaagtgaaaggaggtgttgaaattatttcctaccaagctactctgatatagcatcttttacagtttgagggaaaactaagaacatctgtaaaataaaagatgttaacacttttatgcttgtcagatcttctgatgaaaacaagtgaaaagcatgagaaagcagtataaaactttcctttgtttagtgactcatgttttgaaaaccacttccctgcttagatctatcttttaacacagtaggaacttggtaatatcatagttgcttagcacaatgtcatttctctaaggagaagaccaataatttatttttttaagttaattgtgaatgggaacttactttggcttcaagaactaatatttacacaatacccaatgttcattaaaatgtccaaaacattgacagtccattaaatatttaagggaaaaaaacatattgtttatataaacatatattatttttctatatacaggaacacatactgcattttgttttataattttatgattcaacccctatcaagcaataattagtatactcaggatttttcccaagttgctacttcattgtccctcacagttgtctccaaactatattttgtaaattttttccataaatctaaaatatctataagcttattcttgtctgagtttaaaaactttcatatacctacgttagagcagcactgaaagcctaaacatctgcagaaagatttctgatagaaataaacaaagatgtcaacaaatttagtcatgtaatggtggaaaattttagacttttttaactagaagagatagaaaagattacctagtccaacccactcatttagcaattgagaaaataatggataaagatagtgacttgatcaaagtcacccaggtaaccaagccaggacaaaaatttgggactttttgtttcctagattgatgctttgctgatacgttcacactgtctccttttatctatccaggtattctggatagcaaccaccttacatttaaaatacatatctatagatttgtatcattcatttttaatttataaagtttatagaaagctttgattagcagaaaagattagattattcgtagagcatttaaccaaaaagttacccaacaaatattagaaatagaaggcccaattaagtatggttggaatcctttactgaccaaatatgatgattaactaagcatctggtcatctttctgctcctttgtgtgtacatagctgatagcaaagtgaaagggtatggatagtgtctgatcccagcaagcaaatcatttgaaaacagtcatagctacaggtcaaagattttctactcagtctagatggatctaaacgtactaacctcgattttaaacctaattacctatataccaaatcagtcagaaaataagagaatgactctttatgatccaaagataataagggaagataggaaggaaaaattcaggaaagagactggcagaaccttgatatccataggccaagacagctgttttatatcctagctttatatcagatggttaaaggaaaagtttccattccttagatcattaaatattatttcatttatattacacagatgtcttccatacatagattacaaccaatgaagcattttgttgttgttgtttaaccactacaagcaatcagagaaacctctctgcacatcacttttactctaattcataacatttaaaggatgaggcaggctagatttttaacatttccattaaaaataacacaaagtccattaagtatttcttgtaatcttagcagatgatcaatgccaaattactactattcataataatatagagtgctacagaaccaatacatttttaaataaaatgtttaaaatggctagtgctcctaaagtataacaaaaacctacccatacgatatgcttaactaataattttaaacatagacccacaaaatgtctcatatgacctgaaagaaatagcacataatgccaaatattatattttgaaccaagtacagctcaacactagcataatctacgtctctaatttcactcatctgttttgttaatgtctggcactgatcacaagagaaagtagaaagggagtggggatggatttaatatcctaagaaacatattctacacaatttttgtttcacacacattgttttggctcacaatgtgagtcaataatattatcttcataaacaaaagatatcacaccttgaaaccataaggtcagctttcaattttctttaacacttaaattcattattatctgatcctggtttttctgtctaccttctggaagtgatgttaaaggccagcaaaatttggttctccaggtagaaaagtcacaaagaataatccacaaattatacaatcatttcttaaagttaacagttggctctaccaaatataccctttcatgtgaagataatagtgacttatgaaagtcaaagttatttggcaggtaaaatttaatatttatctaatagtacattaataagttcaaactggtttttaaaaaaaaaaaaaggaggaggggagaggaaaagaaggaaggaacaaggaagaataggaaaagaaaatttttaaaaattttgcttcaacttttcagaactgcttaactatgtatgtaaataaaagaatgtagtgttacaactcaaaaatgtatacatttaaaatgagaaaaagatacacgatttcttggtaaggtcaaaagacatatgccaatataagtgtgaatatagcaagttcaaagaaactttctaaaaaatacttgctgaattaacttggatgttaacattgcacattctagcgcaataatataatggcatttacttcttagtcaggctaaaagctgcttactttaattttcctgagcacaagtcccttactctatcattgtatatttttggtgacatcaaattatgtatagtttaataaagtactcatttatgcagttgctattcaacttgggggaaaaccctgatatacagcatactctcaattttctcattccactatataatacaagaattatatttgtaaagtctaataggtaacaaacatctctaatcatatatattatctaaggcaatccaaacaaatttaaaaggcccacaaacaatactcatcaaaagtacataaaagcattttatttttcagtacagtttgataggcttactgtacaaaattaaagctactgcttttacctgacataaaattatctgaagttcaacctgttcaaatgagaacaatacccttgggttactaatcaaagagagtaaaaaaaaattttttttattaaggctattttgtgaggggggaagaataacttgtttcaacagcatgcttgaccatataaaattattaacaggcactatggtgaactgttcaaggcaaacattcaattactggttattttagattgattccagaataataattacaagtagcttagaaacaatctccttaacactttggaattttagaaaattaaatcctttgacagagaataaaagagaatgtagttttactgtgacttataatgtggacagtataatcttgatgactgtcattaacacatcttacatatatttaaatataattacttcaataaaatttcatcaactagaatacactaacaaatcatatctgggttatttacttttctttctgtttttagtgaaataatttttaaattcagagaacttaatagtgttttatttcctcatttacaatttgaccaaaaataaaaatcaatgttcatttttttaaaaaaaaaaagcattttcataagtatgtagaatgattaagtatataagaactaaaaatgtagcacccacatagatgtttcaaagttagaatttagaggataagactatataccagtaaacacgtggtcctttgttttccaaaaagtataaatcctccagaaatgctttcttttcttaagtcaataatctgattattttttgaaagcttctaaaatatttcctggaaaataagatcatgtattctaaaatttgtttactctttagtaaagattattgagatacaatatattatttttacagataataaaataatagataccttttaagtctcgttaacatgataaagtaacaaatgcactgacgttaactcagtaaatacatttttaagtaaagatcagcaaaaaataaaacagtttaagaattttgtattctctggaaacataaacaggattataactgtcagattacagaagcactgacttcagccattagtttggtttggctcctgagaaacacaacatgaactactgcatcatttcttttcaaatccatacattccctgcagccgttcaagcttcatcagcagtgcaggaatgtataaaaatgacaggcaaagggcattaggtttttttacttccatactgttttcctataaatggaagacaggattctttctcaaagcacttaagctcaagctcagtcaatgctgaaggaaaaatacaactgaattctctatgcaagaaagtatcacaattggattatttactacttttcaaggacatgttgataaatctaatactgtattattatcttagaataaaacattgtaaggttagcattctagcttaattacccattattcttcaattagaaatattttcactttttaaagtactctgtcaactcatcaccttattttaacaccaagtattcagttttgcttctaattttaattataaaaatttccttaaaatatgccaattttttttgaaaatatatttgtataaatagttaattttttatttccaagtttctgtactcataaaggtttcggtgaaataggaaattccattaataattaaaagtttatttaaccatgataagtaaaaataggatgtaatgagtaatctggttatttgactggaccttaaacattcacattgctataaaactagtaccgtaattactacaacctgactcaattttttgaagaaactgggaaattttcagactaaagttttaaacatcctcatattttagtttatagtaactaaaaacatgcccacttcagtactatcacctacattctttatgttcctaatgtaatgatgcaagaggtaaagcctagagaagtctgaaggttacggactacctgatatccaaaacaaaaaattcagatcacaccctgaatgtcctccttccctttttaggaatgtcctgcagctagcccagcaccacagctctgggctgaagcatgccaatgttggcactgcctaagccaaacaaacaagatgtttaacagtcaaataaaatgtcctgcagcctccctaatgaatttgtcaaggaccatcagatttcgcaccccctcctttgcctcattaactcaagtatgatgagacggattataacaagagaatacagatgaatcggtctgaagacttgaagtggcttttagcctctagagtttctttctctcacttggtctcctttaatagaatatagtatctcctgcagaaggagctgccagttcgttttaatacaccatcaaggagctgctgatggacttctatactaacatacataaaagcagaggtgacaggggctcttcaattacagcctcctcggataccgtttcccccttcaattattcaaccagaggaagagaggaccgcaaaggcgcagctgaagctgctcttagagcagaggcagccagagtgagttggggtgggggaggggggagaaagagaaccagcaagagggagcattatttgctggaagtgtttaagtttattgctcgaatgatgtttctaattagtaccacggccataaattaaagtcgcctttgtttaactgatttattatttactagagcatctacctaagacagggtaaattggtaatgaattgtttttaaatcaaaacatttgtaacgttttatcatccttccctctgtatgtaaaagtggagaagcgtaggggcaaggatgcgagaaaacttagccgagcttgacagagccgccagtggaggtgcagcggagtgtccggcgagtggtggcgcgaaggtccgctcggcctgggacgccccacccgagagaagaggagaaggcgcaggacttgcggcgcggcggcggagccatgcgaaccaactccgccacccctgaggctgtttgcaaacactcactctcgggagcgtcgcgggccgggccattcgcgaaccagacgcaacgacgaagcgaccacctcgagagtggggcgggaaagctccgcaccctctatccccgccaccagtctccgcccagtaactgcccccggagaagcaaccacggagcccctcccggccagtcgcgctctcccggcagcgcagtgccctccggcccaggcagttcccagagcgccggcaaggcctcccgggttagagccgggctcccacaggcgcgaactccgagggcgcgaggtcccctagatccttaggcggcgaggcgttccgggacgcacgcggcctccccggagaaggctggaggtcaagcagcccaagtctctgccactccagagaagttaactaaagctctggagtccaagagtcgcgcggacacttaattctgactcttcttcctaatcgcgggaagacaaaccctaagcaacaaatccgagatagtttttttttaagcaaatattccttagaaagggacttatggcaacgagagaggaagggtgacaaactgcctgtggtccgcaccaggtatgtaagaaagaaccaagaggcccaattgtctgataccaagtagatagaaagaaattaacttccctatgcaattcaattcaggttcacccggccggactttaagagggtaagtcaagccctcccaaggggttttgaaaaagccgaactaccaggtttctaaaacgaagtcttcacccaaatggacgcatagatttttatttttatcgcataacccagggctggaatataacctcccaaatcaaactaaaaataatcacatctacctgaaatacgttaaaaagattcagaatccagacatcttaggttcatacataaaccctcagtatcaagcaaatcagaaacaatgttctagctttttttttcacccaaaagtatggaaaggctacagtgggtacaactcgtttaggataatacatatactaaaagcacatgcatgcctttcattgaaatgcctagggaggagtgaagccatctgtgtaatcaataacaggatagttatagatttttgtggcagtgaagtcttttaaaagcaagagtcaattatgaaaataaaatcattttacaaatgaaactctgtacctgtaccccctaagaatacattcacaattagatttacaacagtaagattttaagaaaactttaggtttacatttacttgccttgtttttcattaagtttgaagcaattttagtagcttattttaaaagtatatcctactaagttctacgacatgtaagtttgcaccatttctcacaacttagatattttctctctcgtaactagttaattcttgtaacgataaaataatggtattaaatacatgtgaatcttaattatgaaataattatcaaacaaggtgcttggactagtttttgccctgccctgtttttaaacagcatatcgaaattactaaaaagagatttataaaccctcaccttatatccactccaaccctcactggtgcacatatacagcaactgctctgattcttggcaacaatgggaggggaggggaagagaaaggaggatgactttaaaggaggaaaaaacctggaaaaattaggtcctttcccagattcccctttcgcttcccatttgccttcaagccaaagtaattttgttacagtttgcaccttctactacacaatgttgatagaatcatttaaaaaaaaaaaaagtgaacctttctgaaccattgctactctccctcgcgttattccagccatctccaggagagtcccttctatataaactctttttcttctttgctactgataagagaggaggataaagaggaacggctgtaaaatgtgtgcaagcatttgactcccattatctcctcctattttcttacttctctctttaccctgtttctttatcaagtgcagtggtggctgctaccgttcgccaagcgtgcctgtcttctctctcggattggctaaagcactgacagctcggatagcgattgtaggaactgaagctccaccccctcatgatggccctgggaccattcataaactaaataactccaggaaacagcgagggagagagagaaagaaagagagagggagagagagagacagagagagttagaggaaagaagagagagcgagcacgaggaaggggggcgggggagagaagcagggggagagcggggcgagaaagaggtcggaggggagaggagggggagagacgactcagaaagtggaatctgtaaaagcaagctagaggagaagaaggaaaaccctgaatcgttataactacaccccagatgcaacgcaagcaacgacttcgtcacactaaaacggattttgtgagggccaaaagtataaattacgaagcagaaatgattatcaaacaacttccagcggtttgcacctaaagaaacacaaggagaacccactacaaacaaacaaacccagtccaaacaacgcctccagtaggaaaagaggaaaactgcgataacacgaccccccgagaagagacgagaccaacacgctgagactgtggggcgtcagcaaacctccaagtgcacggcggactgagttgtacttcgcagctctctggacattaattacctcctgcaccttccatttgggggagggtgaggaagaaggcactcacctacactgagcgaagaagtcctatcagcgtggaagagaagtttaagaatgaaccactgaatgtttcgcttttatttttaaatttactttggcacttaaaaaacctcatttccagatttctggacaatctcggctgcagacatctaagcctaaccttttggtatcctgagttttttccctctccttctccttcctcacgcccaccccgcttctctcgcacacggtcatctttacatatcaagagaaagcaaaaaggttccaagaggtacttttctttttagaaaatcaccttttctcccctaattcttctgcagaagaaaagaggtttcgaaagagggaaaaggaaaaaacaagccggctacggtatcagccggtcagcccaggtggaaaacgagagtgaaagtagggcttaacggggagcgcaccgcctctttcgaaagccgctgggccaccaccagtgcgtgagccttggatccctcaacgtattgcgagacgccggtgtatagcccggacctgtgccccaacatgatcgccgctcaggccaagctggtttaccagctcaataagtactacactgagcgctgtcaggcgcgcaaggcggccatcgccaaaaccatccgagaggtctgtaaggtggtctcggacgtgctcaaggaagtggaggtgcaggagcctcgcttcatcagctccttgagcgagatcgatgcccgctacgaggggctcgaggtcatttcgcccaccgaatttgaggtggtgctctacctaaaccagatgggcgtcttcaacttcgtggacgacggctcgctgcccggctgcgcagtgctcaaactgagcgatgggcggaagcggagcatgtctctctgggtcgagttcatcacggcgtcgggctatctctcagcgcgtaagatccgctcgcgtttccagacgctggtggcccaggcggtggacaagtgcagctatcgggatgtggtcaagatgatcgcggacaccagcgaggtcaagttgcgcatcagggagcgctatgtggtgcaaatcactccggcgttcaagtgcaccgggatctggcctcgcagcgcggcacagtggcctatgccccacatcccttggcccggccccaatcgggtggccgaggtcaaggccgaagggttcaacttgctctcgaaggagtgctactcgctgaccggcaagcagagctcggcagagagcgacgcctgggtgctacagttcggggaggcggagaaccgcctgctgatgggcggctgccgaaacaagtgcctctcagtgctgaagactctgcgggaccgccacctggagctacccggccagccgctcaacaactaccacatgaagacgctgctgctgtacgagtgcgagaaacacccacgagaaacggactgggacgagtcgtgcctgggcgaccggctcaacggcatcctgctgcagctcatctcctgcctgcagtgccgccgctgccctcactactttctgcccaacctcgacctctttcagggcaagccccattcggccctggagagcgctgccaagcagacctggaggttggccagggaaattctcaccaatcccaaaagcctggacaaactatagggtgctggggactgcttgaaaagcgacacaaacgggcgtgctctctcagacacacaactctgctataaacagcagaaactctggacacaaacttttatgtaagtcacctgaaataggaatccggcagaagaccttcattaattaagaagcaaacaaaaagagagcaacccaaccaaaacaaatcacattcttgcacaaaagtgatcgttttcttccaaacaatgtgaatttaaaaggtcacacaaaagaagcaatcgggctccgccaccacaaaatgaaacccaaggtacattttcaaatcaatgtatagtagttccccccccttttccttctttccccctatcctttttctctccaccccatccccccccccatttcgttttgcttttggttgcctgaatgttgtcaccaagtgaaaaaattatttaactatatgtaaaatttctcttttaaaaaaaagttttactgatgttaaacgttctcagtgccaatgtcagactgtgctcctccctctcctgaacctctaccctcaccctgagctgtcttgttgaaaacagtaataaaaacattactttacattgtaattgactgtttgtggattgttcttaagtgaaggcaggtgagatcacagtttataatttccaatgtaaagatgtgacgaggaatcaaatgcaagaagcttccacttgaactgatttgcaaaattttaaatacagtacattttgtagaattgactgtataagttccgacccaaatccttagaaaatagaaaacactaattttactcaactataatatatatttgttctgtagatgttaagattaaaagtaacatctacttcacgcttgggaaaaaagtatgaaagaaaatattttgatcctaatttttaaaatagaaaaaactttttcacattaaaaattaagagatgtgctttcttatgccataatttcaaaaaatccaatctgaatccgatatacaaaggaaatatttatggatttttctgaatagttaacaaagtcagttgatacttttccttcaaccgtttgtcctcttcaagctttgagtgataaaaatttaacaattaaataaaccacaacaaaaaatacaatggttatagcaataatcctctccccaagcatatggtgatatgaaccattcagatttataaattacttccattttaaaatggcttagttgtaaattccataagtatgattattttaatcaaatttcaagaattattctgaaactgcttatatgcaattcaaacaaaaaaggttttcataccatttttataaccaaagaaaaattattattccaggatttagaaataggaaaagtaccttcctcctctttctgtttttctaaggtaacaaaccaatatactcatttcaatgtttcagctttaacaaaggtttctttttaatgcaagggaataactgattagaaaataatataattagtcaaacagaaagtatcccaaaggaattggtttgtcttgcttatgttgaaggtaactatatactccattcgctatgctaatgatgagacacaggtacagaatatatgtcagatgttaccctttaatatctaacatttattctttgtattagcccaggttttaatttattgagaaaatgcacaaatgagaggtgtagagaaaaatgtttttaaaggcaattttaaagatcagaggaagaagtttgagagggggaagggctgtatggagggatgagcagcaggatagcagaatagatgaaaaacaagaaagccactcaggggtctgaagcctagttcacttgacaaacaggcttaagttgtgtaagattccttggtaaaaacagtcctgtgttaaaaatataaactttgatcctatcagttctgaaatcatctccactctttcaactcaacctctattatatctatttttctagttgctcttcctgtattcttcacagtaatattaagtggctcaaacaaacaaattcttttaaattataaaaaccaatttattctctggggaaaatgttctgaattttaaaaacattttcaaacaaacagtaggtgcttacatttgcacaaaatgatttaaaggaatagtgtttggtttcaaagataaaaagaatatctataagtgaccatttttctcactcacaaaagtatttacagcagtagacatacatctccctccaactattccagaaaaaaagtttttaagtcttgacaaaaagaaacaaaaatatccccaattcagcatattttcttcttccttatttaatttaatgcaggtatcagttaaaaaggaaaaacactgcaggaacataaatgtcctcatttacagaacaccttaaagcattaacatctatacaaaattaaaacttctcccagtagctgactgaaaaattgtttttaatataaattggcaggagttttaacttctggaatataaggaaggttgcagtgatacagaccatttcttcattgagccaaaagatctccatatttcacaagcaacaagaaaaaaataatttaatgatgctgtacagaatcagatcagagagagacaaaacttgtaacttctctaaaaggagcaaataacttcaaagaacctaatctcacacattggcagagattctaattttcagaacaattaattagacacttttaaattaaatcaaattttaggctttgctctatatgtgtttaaaagcatgatagaatatcttgaattaaatcccagtctttcttaaattcagaagttaccagaaatcagagagtttaattttggtaaccttcctttcctaaagaaactaatgcattttcagacatttcagtcatgggacaaagtagaaaaaatttttaattgatagaatttcagaattagcaagttttctctacattggattagttaacttatcaagctcaaaacaatcagtttcatacaatctaccaagtcctgtcttaataaaggcagcaatattgaaacaaagtgctagaaatatgtgtgagacatgatttgtttgtatagttttaaacaaaattataatattttcatcaagagctactactttgaaatacttctaaatcattcagatttaaaaattcacatgattacaaaatcaaagaacctaccaaaaaactcaaaatatgtgtatgtatatacatgtacataacatatgctatcagcctgcaaaataaattattccactttttaagccacctttttctacagattgcttattttgctcatttttaaaagaaactgtttcctctcagagcaaattataccattctttttcttgaaataaacctaattttggtttttatgactgtgctacaaatgtttcttagtaaaaacaaagttgccagggtctgaaaagtaatgagaaatatattttaaaggggaaattacattttcatttaagaatagaaaattatgcagtgccttgtaaaatctactataggtaatgggaaacagaggtatctcacacacaaaacatgcttgcatgcacgacagagtagtaagtcatggggacaaagcaaggagagtgatatattggcatcatatccagaaaacataaaggctaaacaaaataattccactctcaatctcactgaattttgtatcttaattcacccttgaccctttgaggcaaaatatatttatagacaatgttctcggaggttccttcccctcctcacaaagagctaatgataaatgtcattaagtagaatttgtttttgaatctaaatgaacttcaataatctaactaactggtagggaatcataaactaaagaagataatgacattgcatataagccaaggcaacttagaagaaattcaaactaagcctgtcagatttaccaatcccaatcctatccaacagcacccaccatcccatcataagaaaaaatgaaaccccttcatcttctcaccttggggtcgatttttttgaagttaggatcctcttcatccacctcaaaatagagttcggaggaggtgacagaaagagtgccctttactacaacagagggggccacaagctgagctggtgtgctcaggctaacaggacctgccaaaaggaaaagacaagccacacaagttggaatgacatttttcaaaaaatcaaattcgaccagaaattgtatttaatcttttcattctcacgtctagtactgaactgcctgccaactacttctacagttaaatattctgtccaccccaaatcttcctctgaaaatgcaaagtcaggattctcatactacaagatctataacaggcggttaatgataacagtaaactaggatgcaattattttacagggagtctgcaaagctttggtctaatctctaggtaagaagtggctctgcctaaataagtccatccacattccatttagaaaacaggcctcaggctatctaacaacatgaacaacaaccaggagcaaagaagcctcaataggcttccaaggccagcagttagcttacagtatggtagaggcatggctacaaaaagatcactagcttattaatgaagtgggaaatgttaaaccatattttctgatagagattttatgccagcttgacacaaaacctcttccataacaactttaccccatcaatgactggtaaaaatacttcttttctaagccttcctttccactgttaagtattgttcaatgcttccaaatctaatattagtgtagttcagggactctgggagtaaacagctggagggtgggtttccaagtgaatgaatttttattggaataatcaaatctccacagggcttatcaaagagacaaatcagactgctactgaaaacaatagattcactacagacagaacagcataatgtgtattagagctaaatataaaatatgaactaaaaatgttacatatatatgtctgttatgtctgtgtgtgtatacacacacacacacacacacacacacacacacagagagagagagatcgacgtagaaagaatttgaaattccattatcaattcctcatggtataaatcctataggggaagaaaacagcataagagaagattggcacttatagttctgaattaatatagtgcctataaacaagctgtgcctattcaggtaatcaatgggtgaataagtgtttcaaaattcagatgaattgacatttccatcgattgttagaagggtgatagtgcttaatctcacatcaatcttaatgtgtgccagtaggacaatagaagggatgctctgcggagatcagagcaggttttgccctctattcccaatgtacaaatacattgtgtttgcagatgggcagcagatagctgcagaacagccatgatttcccaaagctcatccttataaatggatgaaataagaagctatgtgttcttttgctgtctccttttgccctctgtacattagcatgtaatactgagaagaaataacattttttcaatcactctcagacattcaattacagggtaagcagacagctgcaagagctagggcagcctaggtcctacagaagacccctgacaatttccacttcatttctaacccacaccactttattagtgtggattacttcttaatcctattgccattgtcaagattatataattaaactcccctttcacctctattactgtatgaatgtattactagtagcaagaatagaagcaaaataaaggaagaaatgggtaaatggatgtgaaggaaaagactacagaatagcagtatctaccttactctccactcccaccaattaattttattttactttatagagaggtttacagttatcagagaagataccatcttctctttttgcttttcattaccaagtggcatagtagcacaggttgcagatatgtcaccaaaagcaaggtttttaatgtcttttctcttaaaattatcaaaatggaatactatgtaattttcacctattgaaattatagaacctttcagactttcttccttgagggacagagccacaggtattaaagtaaaaaagccatttaatgaatgactaaaatttccggctaaacaagagaatttttcccataagggatgtaaaactgagaatctgcagagtgcaaatcaaaattcctacatcaggcaaaatacgtgaatgttgtgaaaagccatggcattctcggaattgatttgagagagttacatgcatatacagcatgttcactaagacctgtatatcaaagcaaatagcttctctccttccaagctttatttacaaaaaaaaaaaaaaaaaactggcagaattttacttatagtcttactttacagagatttggtaactcctatgggatgggtgaagtaattttgttcttttgttgctgcttttaaactttttctttttcagtgaaaattattcacaaaagaaaaaaatgaggagagtaagaagactgaatagaatagaaaaataaaggagaaactgtagaagggggggaagtatttgaaataaccaattaatgtaattgtgggtataaacttggtagtcctagtggtcacagctgaaaaagtaagtaattatatgcttattgtcccagaggtagctgaaatatctgcacaaccaccaaatttaccggcaagattctctaaatctttctcatccacggatgacagagtatcatcatcgccttccaggaggatctcgttttctgagttctgatttcctaaagcctgactcctgatggactgttttcctttagcaaggatatcttcatctgtggctgaaatgaaaaggaaacaaagctgtccatcagttctgggaagagcacttcggcagaggggtaggggcttaggtaagggtaggtggccaaagatggtcaatcttttatacacagtgtcagctacagtggagaaagtgattgggatggcacacatgcctgatctgacaaactcgatcccccaacctagtctaatgttaccctaaacaagcaccctaatcccattaaatttgacccctgcactgctcaccaaaccatttatttacttatagttagggtaggagtggttcaaaagcagtacttttattgaaaattcattaataggaacaatcaaatcccagttttggaaacaatatttaacagcaaaaaataaggactgattcattcctccaaacaatgttatactgacaaacattttggaatggttgaggagtggctgtggagaagaatccagaattaaaaagggttaaagctaagagacattcacaagccagtgaggatttaggcccagatactgaagccatatctgacactaataagactacagcagctcctcaaagctgcaatctcttctttatccaccctccctccttccttccttcacattaccctcgtccacatgttcacacatacactcactcctccgcccttttgtcctttatacaaatatccaggagcaaggcggtgtggaaactaagtggaagctcaaacactacctcctctgcatgtttaaactaaagggctaaggcaccccgggggcaaacataacagaaagcctgggatgagaggcatgtgggcaaggggcctcatgcggcctgaactggagcagcttgtggagagcagcagtaccagactcaggcactatgacaaggcagcaactgcaggcagatggaggaaaagagaacacatctagggagggaagaagcagccctgcagagcacctacactcaacaatgggatccgaaaggagagcaaagacgcaaatgaaagtggaaaaccctgaaattcaaaactctgattcaaaacccacatccttccagggctcctcctgttgttttgagcagctttctccttacgacaagcaggaaggcagatgctaacttctaaattgtgatttgtaaaacttcatatgtgtatcttttcctaatctttttttgaatggtgtcatataagggaaagttaagaatcttcacctgaccctcctggcttccagctagataaatcccagaggtaaagcacctgatctacccaggctgcggcttttgatatggaaatcggatggctagggttttttttttttttttttttttttttgctccactgcagcttctgcctaggcataaggcccaaaccccagaaagaataaagcagtcaatttgcagtaacacgactaatatatatatatctatataatttattctacatagttaacctgcacatgtgttacctgatttggcagatcaaaggttcttagggtttgataagtacgtttacggatgatgttaaaggtaaaaggttttttttttctcatatttattgcgaattcaccatgtataccatttatatacaatacttatagtgctactgaaacataggagttttctatttaataagaagtcatgggaagaagctttctatatttacctttaaatacactctatgggtaaataaaatctttcatactcacaggctgcattgtaagctacacacatatgatggtctggacatatgtttgaaaagattactttagtgtatctaattaaagtggctttatttattttttatttaatttttttgagacaggatcctgctctgtcacccaggctggagtgcaaaggcacaataacagcttactgcagcctctaggctcaagcaatcctcccagctcagcctcccaagtggctgggaccacaggtgcttgccaccatgcccagctaattttttaatttaactttttgtagagatgaggtcttcccatgttgcccaggctgatctctaactactgggctcaagcaatcctaccacctcagcctctcaaagttgctgggattacaggcgtaagtcatctcacctggcctattttttttttaaaggctaaaaagaaatatacttacaattaaccaataatttttagaaaaacagaactatgttctaaaatcacttatatttcaagtatttatagttccttactctaaaatcagaaacactgccctgaggctaaacaagatcttttgcagtttgctatcaacattattaaaaatatattggccactgagaaatgcaaatgaagcaccatcttctaaatgtttttataaagtaaattataataaattattattttccagttagattttagtacagaataagtataccacattctttttatttcttggatttataattccttcttcaaagcagaaataataataaggctaatattacatatcattttgcataagtcagggagtagtgttaaaaatactttacatagttaattcatttaattctcataaaccttctgcttagttctaattttaagataagaaagcaggctcaaagaggttacataaattgaccaagttaacatgcgtttgacaattagagtcaggatttaaaaacaggcagcacggtgccagaagctgggctcttaaccacgatgccatattagctcttagatgtaagaaacagaaagaaaacaaaacaaccactgttcaaatatgaatgtgtatataattaatttgtttactaattcttgtttttcatagtgcattttaaaaggttaaatgagaataataatcaagaacaaaaaatattcatttccaaatctaaaattgatgaacatgccaaacacatcagaaacaactaaacaccctgctcattacttcctctgattattgccatacatgtcctaaagtacaccaagcttatgtgaaaggaaaaaagaagaaacctctttaatctgcaaacatttacaaaaaaatgagagtccccagtggcaatatgtaatggtttaaaatagctcaaaaaataaattcacattcatttataaatgaccacgagaaatataattatcccttccaattgcaattaaaaaatttttaaatatgttctaatcatgctgcctatattaaaacacagtaaggtaacttctgaattaaagtttcattaaaaattttacatactataggtgtactgtatgcatacacacacccactttaatttatttatttacttatttttacaagctcagattctggaattgttcaagctccactgaaaaacctcttgtcatggaaaatatgcagcttactgatatttagaatggttttcctgtaattaactcccccttgaggattttaagttagcagcagtaaaattaccaacagtactctaatatacaccacatgcgctggtgttcaattctcagtggtctaatagctttctgctaaagaaccttaaaaaaaaattagaacaaaacttttccaagcataaaataaaggattattatcatgtttatatgtactggggaaaagtatatttttaactttcatttgccttattctcaatcaaccattataaacaagtattttgatatcttctgtgagcatattctacacacgtctaaaagttaattggatgaagtcagaatatactttgggttccattttaaagctcaattcagatatttctggctaataaaattgttactaacatgattgctgtttaaatttttcatatcattattaagaaatgccttttattctggtttaatttcaccttttattctagtttaatatttatcctaacttaatacttaaactgcaattgttacataaaattggagaaatctgtcagaaatgtcatctttaaaaatgatttgattcactgaggctaagaacaatgaaaggcctaagagagagaggctggtccccaaaatgtaaaattcaagttcttcagagctaactctggacatgagttgatttatctatccaccacaaaacaggtaagtagaattaaaatataaaaacagcaaaaacacacacaacaaaaactgttccacctttgatataaatcctttttaacatctactgagcaagtgaactggaatcatcaatagtctgtattaaagtaaaagaagtttatactttaagaattagcatttttaaaaaagactactattagaataacagagtgccttcaaacatacataaaataaaaatgggtatctacttatgtgatctgaagcacacaccataacagcattctgaacaggacacataaagaatatcttataatcaactattgttctaattgattcccctctatagtttatgccatgtccatagcattccaagtcaagaaaactgactctgtaaaaattaatgaaactacaaaggataattaggagaataagccaggtgcatctcgtaataatcatgggctaaccaaaattttagatagagaacctagtatatgttgatcctaaaaaggaagcaacagtatctggcattattgaagttatgagacaatggcacgatttaagatctttacatgatctgtcatccctagaaaaccaaatgagttacttgtatcattccatatgcttacaagatacttttaaaactatgttaaattctccttatatatttctattagcaagcacgttctctaccaaataaaaatgtcttgaattcaataggattctctgctaaactgttttagcacctgaattaaaaccaatctttctaccgtttaaaacattttttacatgtctttaatttaaatataaaattcccgttatatttaataatgaattttagaggacagcacagcacactgatatgaaaatctgggtttcagtcagttaacctgggctttagtcctttatctaccaaaaattatactggccctttgtttcctcagtttccttatctgtaaagaataaagttagactagatgttagccttaggttccttctacatctaaaatgctctgatagtaagtaacagctaaccagggctctggcattaggaaaatgttacaaatcattgctaccaatttctaataaattttaaaactataaaatggaagaaaatgccctcaagaataaaatgcccagctttgcttgagctgctaatttccataaagaatacttaatcataagaggaagtattaattttaattttaaaatatgactcagtttctgcaaagttaaagaaatctcccattacagcatgacttttataaataaccactttggagggtctctgcttgaaaaattacctaaagcttttttccccaagcaagttaatgtgaacttgggaagggcaattaaattgtcagaattaaaaaatttgtttttaactagaaggtagccagaagtagagtcatggggctggtattgatcgcccaaacagagaacatcactcttcaggtatttactctgccacctttacactagaggctttccttcaaatcaaatcaatctataaaaaagatggctcttactactaaaatacgtaactgatctccaatggcacttctatttagatgtcttcctttgataatgataatatagttcatggtgttctaagattctgcatttttaaaatgtcctatctccttagttaaataaattataaataaaagtgagaagtcataaaaatataagaatgacatactatcctcattaatatatattttaaacatttaaattcaacattgaagcacggtatttatccatgttaaaatctgtaatttcaactgctttttgatcacattaacaattttgttttgcatacttaattcttaataagtttattttgattagcttctttaatgctccaaaatttttaaacaccaaattaaaattgaatgtcaccataaaatatttaatacaccagtaaaaaattaagctctttgtttacagaatatattagcataaattttctaacatcgaacaataccataatacaatctatgtgctgaatttattccctttttatttaaaataaaataaatatgaggtaggattagaatttgtgtttttttaaaaaatgttatagtaaatattaaatatgatatatctctgaaattgtaagacaactgaagaatctcctacacatttagatttttaaacatatatttcaaacgcaagttttgtttttaacattttggagtatgacaataatcataaaattactataaaatattactcaatgcttacctttgctgttctctctcaatttaaaaatgcacactaaaacatagataattaacattggattaacctttcaattactatcgagagtaatcagagtgaaatctacttctatacaagtcaagagtcttaggatgatagtaaaaacatgttaataaattcttttttgtcaaactttaatgcagatgcttagcattaaaaaagctgacaaaacaatatgattttaagagctcaacaattaaaatttattcattaaaaatcctgtaactcttcaaaatggttaaatgtactatttttgataagaatattttaataaattctatattaaatctataccacaaattttaaattgaattattgatatctaaggataaaagattaacagcctatctatgtgcaattttagaaaacaaatcctccccttccagatataaaaggaaaatgtttttacgaaaacatattgccatgtatagatctcagaactcacaaattactgtaaatgatggtttagaagacagaaaaataattaaatttcaaattttaagtggacatggtaatacattttgttaaaaattgcaaaaaaagttcaccttctccatgtaagcatcattaaccaaaacaaaccagaaaatccaaaaaaacacacaaaaaaagaaaaaaaaaccctctgaaatctgttatcaccacctaaaaactatatgtactctaaaagcaaaagtggcctaattaattctacattttatttctctttctccacctcctgtagttgaagatgtagggccatgagactattattgcttttagatcactttgttattgactattctctgtatgatcatttattttaaaggactgatgtaacatgtggtgttatatctgatgacatattgtggacattttcttccagaaatggctctttaaggctgagtgcaagaggttaagctgcctgactgaggccaaacctaagattacagatttttaatctaaattcttaatatccttattgaatataaattaacatttattttgtatgctacatatttccatttaatcacaagctcctgcatgttaaaacaataccctgaaaaaggaaaattaaaagtacttctgactttattaaaaaccaatttatattttataaagtcaggataattttaatgtggggaggagcatttcccccttaaccaatatatcttaattgactttcaaaaatcataaaataagtgaaattttataaaaatttatagtatcaaatccaaaggaaattttcagtttttccaatttacttataagacttttacctaaactgaatcatagtcatatgcattgtatcaaaaaagcaaaaatgttttgttaagctctgataacaaaataatatagaataggaacgtatgaaaataatgtttattctctttttccatgagccatctatcataaccatcttcaaatcaaggctcagaaagtatctaggcaattggacatttattattatctttcccagttcatgatctcatgctaaaataccaggattgggcgaaaaccatgtatacacaacagaacctagaaacttatctggtttgtaaatgctgtcttcctgatattcatggatttaaggcatgcctcctggattcatttactcaaagctgaatgtgtcgcttaaaaggagacatatttaatctttgtactctgaaacaaagggtctatgttaagtaagttttgtatgtgtaacataattaataaatatacttgacaccataatttaataggactctatagtaactataaaaaaatttaacttctctttctggtatgaacaaccataaaatgtggtgttggaccattttacagtgccttgtaataatgaagttatgctcttcattaccaagtcctgtacctgctgctattggcaaggaatggtttatacactgaccatgttccacggctgtttttagtgtcgcttcaggatgtgtcgatcctagagggttacgcacaaatcgtcgccggcgccgcaagtcatcttcccagtagtcaaggcgccagaactcaagaggacgactacaatgaaacagagaagccacatatgttagcaattatcaaacagcgtggtagcactgaatttctgcataaagctctccttgtttgctctgcctttttttccctctccttccacttaattctccctccatctcacactcccctttctgcaatctttaacttaggtatgtccttgaaaataacaatatcaccttctagtctaaggaactccttttccttttcttggaaggtgaaatgagcactaaatacatcattttgaaatgaattgctgacagtgtgatcagtttccccacactctagtggcatgtgctctgatttcagcctcatttcagcctcagcagggcacctttctctgtagctgcatttataaaccagaatagggaaaaggctattataaatatggtatagcattacctatattaatcaaagtccgtcccccttcatttttcttcctaatttgtgcctttttgcacaaggtcagtaaatcataccatgaattcttggtccagaaagtgttaactttaatgaatatctcagttacatggttatgtatgtgataataaaatattactctgtttagatgtgcaggaatttaattaaaataatctcttaaaatattcattacatttagcccctgaggcttagaacaacacaagaaaatgcatttcttttccatttactgtttttaaataaaccattcctgtagagtgaaatagcaatctattttcaagcaaatcagattggatttctgttttatgtactctgtttttatatttaattaaaaactacatgctatatgatgtgcaataattgctatatcaaaagcatacttttggaaatgtattttttaaaaaaaggtttgctcatttcaaattctatatttcccctattacatacacattttatatggcaatatataaatgtcagctttctctcttgttaactaatcatgatctagcatgctggaaaaatattttataaggaaaatactaaagtgttttcagttatagtaagaaaaaagtctctgtagaatacattaattcaataaagatatacagcaggaacacctgtaagtttcaataatgaaattaaaaaattattcataatcaaaacttcttcaggaatgactaatacaaaatacaatcttacttatatttcgggagctaataaaattgtatctgtcagctttgacaaattagtagtcttcaacaactgacagtcccaaactacccaagtaaaagttacctttattttgatgttttaaagatgttctctttaaaaattcaaaataggtttataaataagtacttttatcaattaaaaactatcttgtattaataaaaagcataaacagtacgttatttaaagaaaatctttttaaaacagtagagactgatctctgaaaatgctgaagggataagaacatcaaatatttccttgggtgattttggtcaggagaaggagatataatgtaatcaaaatgtaatacaaaaaaagtataagaattgcagttctcaaaaagaaaaatttaaaaagctattattatatatttcttcattattctgtctaaatttgaataaaaacatgatgatattatttaaaaataaataaatacccacagaatatacatacaatcaaaagacaacagttgttttaactcaattaataaaatgaaattctccttaggtgagaaggaaaaaggcagtacacagatggctgtgtgtatggctttgatagtcatggagcttggataggcacttcatcattctgcctacctacatttatctgttaaaattattatcaaatatcagccaggatgcagtcgtgaatcacaggctgctcctcgccttcaggggaatgatacaatgagggtctattcatcagtgcggcaatcggcacaagtaattagttccctagactgagatctcctacaaagcctatttcagtcagcaccacaaacatatgacgatgtaaagctaatgaaagctgctcaaatttgttaaccttttctgccatctatccttctaatactctatgcttcagtattatgcaaaggtagtaaattattaatttgtcattcatccatccttctacattttgagtcaaattaaatgatgtcattcttcttgataacaattaaaattataagagatgttaagctgctatgataaaattatgactaaattaggtaacaatagattctactataatgcaccacagtgaagtcaaattcaatggctattaagcatatgcacaataacttttatcacacagcagaaaaaccagaggaattataaaattattcacaaattatcaagtaactcaaagataatatctatagcaaaaataaccaaaattaggaggaaataaaacgataatatttatttttataccttgacactaaaaaaaatggtcaaaatggtgacatttggctaaaacaaaaacaccaatgcatcagggaactgagaatttgttcacataatagaaatgaaagttgtttcatttctgctaactatatatatatatgcagacatacatactgtcttcaaatatattctatcaatttttttttctttttgagttggagtctcgctctgtcacccaggctggagtgcagtggcactatctctgctcactgcaagctccttttcctgggttcacaccattctcctgcctcagcctcccgagtacctgggactacaggcgcctgccaccatgcccggctaattttttgtgtttttagtagagacagggtttcaccatattagccaggatggtcttgatctcctgacctcatgatccgcccgcctcggcctcccaaagtgctgggattacaagtgtgagccaccgcacccggcctattctatcaataatttttttaaatacttaaacatggtccaaatagaataaacgacctgtaataccacagcatgataatatttacaatctcctgaagctatgtcacttaaggactatttttccaacacaatccagttacaacacaattaaaaacaatctgaagacaaagcaaatatcacttagttcagatcacatatctagaaagaattataaaaatcatttcaaaagaccaacaatttcaatatattttttgagagtctcttcatataaagcactgctccaggtgctacagtgtacaaagttctcatgtaatagacttataatcaaacagttagctattagtctcatttgagaaaatagcatttatcacccaatttcagattgtgtaggtaatacatgtttttggagaaaaagccacacacccacttatttgagatatatttaaagtcatttaaatatatttaataactagcatatttaaagtcatttacacagtaacaaacctgggcctaaagtacaatgttttgtttccctaagtctgctccctccaacaacacatactctcagtataacgctctaccacacacacacacaaaaatgaggccggctttgtcattttaaaacagtattataaaggagaatgtgtaggttttggtcttcaacttactttcttcactctcatttaagaaatactgttccctaccccgtcccttcctcaaaagcctcttccaggcaaaagaggatacaaaattggcaaatttattaataacatagtgatccaaccctcttcccaaaaggttataaagtaattaaaagattatacatttttgtagttatcaccatggtacgatcagcaaaatttaaaagacttcatgtgttcagaaacagactgttgaccaaatataagcatggataagatcagaaatcacttattctggcaccttataagtacatatctagatcacattatatacctatacctttatatatctgtatctatccccaaaagttatattaatactacacaacaccctttcacaaacttcactcatatccatttccactaagatcctcaaaatcttcaaagtaaagaggttagcctaagttttagatctggaaatactatttccttcagaagacataagcccttctctacaaagatgccctacttagggctcctcttaggacacaatctccaggtactaaagtctttgactggtggaacatatgtctttaaaaagttatggatggcactgaagttaaatattataatctttctaattattttttaatttagttttttcgttctttggtctaacttcagagtctgaagttaaaattaccatgtaagtctattggacttttctacatatacgtcatctaattatgtttctactttttaaaaaactttcacgttatgtgtttgtatacacacacctttaatacatcactataatctacataaaataacataaagcaatgtcatggcttttttgtggttgttgttgttttttaagatggtagagtgtcacccaggctggaatgcagtggcaacatgagggaacagaacaaagctcactgcagcctctaacttttgggctcaaaagattctcctgcctcatcctccccagtaactgagacatcctccccagtacaaaaattagtaatctggctaattttttttattttcttagagatgggatcttgctacattgcccaggctggtttcgaactcttggcctcaaatgatcctcctccttgagcctcctgagtagctgggattacagacacaagccactgagcttggctggcaatgccattttaatacatagaatatatgttttatgttctacaagaacagaatttgatagattattaaatttttagaaagaaatataactcaaacatcaatagataggctatttattctatttcctaggccctttatggttactgatttgatcaggtagaacaaatgaataagaattaaacaaatgagaatcatttggaagaggcagaagtattaaaacaaaatcaacaactaaggtacgattcacatttttcctctaatagttaaatgatacaactatacaaatttgactattatttttctcatgttaattgtaagaatttttaggctgggcactgtggctaatgcctgtaatcctagaactcagggaggctaaggaaggaaaactgcttgaggtcaggagttcaagaccagcctgggcaacatagcaagaccctggttcaaaaaaaaaaaattagacaggtgaggtggtgcatgtctgtagttctagcttcttgggaggctaaggtgggaaggtttcttgagcccataagttggaggttgctgtgagctctgatgatggcaatgaactctagcctggctgacagagggagagactatctccaaaaaaaaaaaggaattataaagtttagattttttgaaacccaattagccagttaacatggtatgaatggccaaatattctaataaaataccaatatattttctaataacaattatttattatttacctgagtcagctgtggcaatacaaggattattacaatgttgtccctgatgtcatggaaaaggcagatgcaaaaacaaataataagaattcaaaaaagtatgtgtaacagaacagagctttactacatggctattaaggtgcacaactccagggggcacttttcacatcaaaatttttgtaaataacatgccctggagttatgcaatgctcactgtacattactatatgccacagcccaagtgctaggagaatactacctttacccacacatcccccagttcccctgccccacaattcaatgctcaggctcctttctttctctggaatccaaaagttaaatctaaacttgggaacaggaaacagaacaaagcccttcagacactatcagtggcagttgcacagtcagtatttccctgctgtaggaaaaagtggacatattaggaagatgcttggttgtcaaaacacaagcaaaattcaataaaaagaatgaaataattaagtacataagagaaatattaacatttatttaaccaaaaaccattaagttcgcattgctatattaaagtagataactttctggatattgctgtattaaagcagagtagtttccagaacaatgttaattactgaaatcagtggtagctatgtaagtatcccagttattctacaacctagatgaattggcacctattatcaaatgagtcaaatgtattcatgtctatcatctcactggttttagtgtcattttaatgtaacttaaatatgtcaataaaagtatatgagttttaaaaagaaaacctgtcaaaacacaatcatattagaaaattttcccattttccatctcgcccactttgctttggcaatacctgataaatcttgataaccttaacagaagtcagtaagaaattctcctagctaaagttccaaatcctagaacattttagcacttcatattttgttcttaaattttcacattgcctgttttttaaactcctatatctgactagcttctatttccatatttttagattaaaaattcatagtagacattagttacaactgaaataaatggtaacccctaaaaagcagtaaacattttcagagcactgtcagcttgaagataaaaagcacttaagttctagaaaggtttcacattctgtataaatcttggtgaaataatgttcaggtactataggtatcatacaatataagagaatgctttacctcacaaactgaaatctatggtgccttcatgcaaataaaaagaaaattaactaaaacctctgtttaccaagtaccaactataaatcaagggcagctgatctatgcattatgctgtcttaatgaaaaggacaaacaaaaacaaaaacaaacccttcaattgtgtggattccagcagagaagacacatactaaagcagaattctttctttattgaggcctgacattgagacactggagtatcatatattttatttaattatgtaaaatcaaattttatgtaattaggaatttctgcatgtcactattcaatgtatgtctgtatttgttttttaaagccatctagatatccatcttcaattaattattagtttggacatttggcaaccaagttaattattcaagaaatgatcccaagcttttcctgtctgttgttagccagttgaccatttctttcttcacttagaatttttaccagggattgagtaaagttatgagactatcaaaatctggtgttatactaccagttaaagctctaacaaaagacatctaggaaaaaaaaccattaaaatgatgttattaagaaccagaagccttaaagctcacctcagcctcactatttagacaaatctattatactgtccccaaatatctaatttaaaaaaattcaccaaacacttgttgagtgccaactatgtaccagattgtggtacatacaaatgaatgatgctgggctcaacctacacaggacaatggggacaaggaaattattaaatataaaaaaaataagttaaaatagactatattactttaggctactctgtgctacacactgttctctgttatatacagtaccgccaagcctcaacaaccctgccatgattaaatactgctattctcattttaaaggtgacgaaagtaagttttacccattggtagtaaataataagtctgatgacgtctaagccaatgagcttttcactacatagcatttcctcttgaacatcttattcgttactattatagctatgatcaaagtactaattaaccctgcctgggaggactcaggatttcattaagatttcaatgaggatctattttgtaagttacatgaagagaagggtttatgcgtaattcactgaccaagcacagtaactgttacaaaactgccacttaataaataattgatcaaagagtaaaccgatgacttttaaacagaaacttaaatgataaacaggagtctgctgaacaaaatggaaaaggcactataagccaagaaatagcatggataaaggcatggaaatgtaaaagggctctgtaatttaaggaagttttggtaagaaatcacagctagacagccttaggatgggaaaagctaaggtaaaaaacataggtttagaaccagatttcaaaagaccttgtagagttaactaaagtaactacctgtacatcctagagtctacagagacagcatcaggctttcacaagaggtttaatatgatcaggcttgtatgctacacggcagcaacatacagaatgtctggattaaggcagtgaggatggagcctagaagtgaagggtttaaagacatatctgaggtagaatagataagacttcacatgatattcaaatatgggaggtgaggaaaaagataatgagaataaaatcaagggctgtaacaagagggaagttagaagataaagatgctatttaattaaaataaatacaggttaaacaggcctgactgggaaaaataatcgcatcctagatgcctaataacatccaggcaggtatttctaataggtaagtaatataacactggaattgaaagagaagaggcctgtgctagagatttaaaatagggagattgaccaggcatggtggttcaggcctgtaatcctagcactttgggaggctgagacaggtggatcacttgagccgtggagttcaagaccagcctggccaacatggcgaaaccctctctctacaaaagatacaaaaattaggcagacacggtggctcacacctgtaatcccagcactttgggaggctgaggcgggcggatcacgaggtcaggagtttgagaccagcctggccaacgtggtgaaaccccgtctctactaaaaatacaaaaattatccaggcatggtggcatgtgcctgtaatctcagctacttgggaggctgaggcaggagaattgcttgaacctgggaggcagaagttgcagtgagccaagatcgcgccactgcactccagcctgggtgacagagaaagactccgtctcaggaagaaaaaagaaaagatacaaaaattagccaggtgtggtggtgcacgcctgtagtcccagctacttgggaagcagaggtgggagcgtcacctgagcccaagaggttgaggttgcagtgagctgaaattgtgccactgcactccagcccaggtaacagagtgagatcctgtctcaaaaaatatataagaaaatagggagactggttagtcttgggagtcagtagatttagcattcatttaacaaaaatgtactgagtgtttattgtaagcctgggtattttgctagacccagagaagagtctattgaaagggcaggagaaagatggggatgaatattgcagaacagaaaaggatcagtaaaagaaacagggaagtaacagtgccttacagtcaataagataatgggagaaccaaaatagaacggtgccaaaaaagacaaatgagcaaaaatgtttcaaagcagtcagcgggcaccattatttaattctgcttaaacatgctcaaaaggatgaaaaatgaagagaagtctttgttcatgttttgtgtttttaacagctttatgatatataatgtatacaccataatgctcacccgtttaaaatgtacaattcaacgttttttagtatatttacagagttgtacaatcatcaccatgatctaatttaaaaacatttttatcaccccaaaatgaaactccatacccattacccgtcattccacatcttcccttcctcccagcccctggcaatgatgagcctaccttctttctcaacatatttacctattctggacattttatataaatggaatccatacaatatgtagaattgtgtgactggcttctttcactcagcataatgtttttgaggttcatctatgttgtagcacatattggtagctcattctttttattactgaatgatatttcattgtgtagatacgctgcattttgattatccattcatgtactgatgaacacttgagttgtttccattttgtggggatctttgggttttacgatgagaaaactgaagtacttggttagctatctagcattcacttctctcctctttcctaataactgaattacaattttgttcagatatctatcactttttaaatgtttctctgactcatggaaagctgaccaaattatgataaatccggtcattctcagcagcgattggttcaggaatccagctttaagaggatcactgcataaattctgcctagcaaccacttttcaccaatatgaaatggaaaccttctattcagtggttgagacaagagttctttctttttcctgatggtctgacacaatgaaacatgtagatccagttgctggcagtcataaggcatccatgagagaagccagattggaaatagtttatacatccggggacagagaactgaaagagttacaggaaaatggagccagaagcctgccccaaagcctatacatatctgtacttcttataagagatattatacttcttcataatctagtgaagtcaggaagttcacttggtgcaagatttcttattacttgcctttgaaaccacctaacagatacatggattactggtgatgctgtgagcaatttgattacagtggctggaaggaaaagtagagagtaaaacacttatgctttggtggcaatggttaatattgatctcctcttcaaaaattttgacgatgaaaggaattagagagctaggatggcggtttaaagaaggtaaagaacagacttaagcatgtttgcagaaggaaaagacaaagtccaaagaattcaaagaagctgaagatggcattgggggtaggaggtgggtagcaggagcagggtttgataaagacagaagaggtatgatcccataaaaagataacatgatgaacttggaagtaactaaggtcatctctttctttgtggcaaaatccaaggatgtaagactctgtactttaataaattcagggctgaagagaagaaaaactaaagaccagattttcacctgattgtttgttttttttctattacgtagcatatttttgactaaagaaaagaatagaggaggtaaaattagaagaggtgccttggggaatacagaagaaagctgacaaaggaaaagtttaaggatgattaaatagcttatgaaggtccagctgagtttggaaaccattgaggtagcatcgatctgcagaactgtgtgatttttcctataccctgaccctgaccatacatagtaacctgggagaaagagtaaaaagagcagctgaggccaggtgtggtggctcacgcctataatcccagcactttgggaggccgaggtgggtgaatcacgaggtcaggagttcgagaccatcctggccaacatggcgaaaactcgtctctactaaagacataaaaaattatctgggcgtggtggtgtgtgcctgtaatcccagctacacgggagactgaggcaggagaatcgcttgaacctgggaggcagaggttgcagtgagctgagattacaccactgcactccagcctgggcgacagggtgagactcccatcacaaaaaaacaaacaaacaaacaaacaaacaaaaaacaaagcagttgaccagactcattcaagatttaggactgatttggttggcagaccaaaataaggaaggttaaggaaaatgagtaggctagtaagaacgcctgggatgactatgggtgataaatccatgatctttctggactttaataaaataaataacataggctttatagacattgactcattgggaaatcaaatttatcctgcatcccaagctacttatattgatgataattaatcaatataactggcttatgatgcagtataaatttgattttccaatgaaacaatcagtaattctatttaatcaatatatccagtccccttatttactgctgctatgttttcaacttgtactaaaacacatatagaataaaagaatggaagattatactgtacttgaagactttcttcagtcttcaaaatgataggatcactagccaggagatgaggatagggaggagaaggttgttgtaaataatcatgggactgaacaatctatacgcagagaccatctgaaggcttagggaggcaggacctcactcttttaagaagtatattacattatgctcctggaaagaggatgggaactaaaatttactgactgccaataatgtattaggcatgctagtacgtattttacatgtgatctcatttaattctcaaaacaaccatataaattagagatataacacctatttaacagttgaagaattgaggcccagaaggtgagtgattcagttactaagaaatagcgctagaccctcccaactagaactacccattaccaaaaattttccaggctactttggctaagacattcatatgaggttcattaatatacttcttatgacagttcattatattggtatgagtttaaatatctctttcataaagtgacagatataactataaacaaaaaattttataaattatatgaaaacctatcaacacacatttcaataaagaataactagaaaattcataatttttccagcattagcatcactcaaaattcaaatagcaaggctattagactaagggtaaggagttacaaggctctatcgcttttcaatgtataagtataactaagtactgtgtagtgcagggtcagtatttgtaagtaagtagcctgaaagctattaatattcagaaatatgtttagtaaccacatcacttgccccaaatttggaagaactacataagcatctacatgaagcaatctcatatccaagaaccactgctttggcatacagaacctttatttctacgcgctctctctctctctttctctctctctaagacaaggcctcactctgttgctcaggctggagtgcagtggcacaatcacggttcactgcaacttcaacatcgcaggctcaggtgatcctcccacctcagcctcctgagtagctgggactacaggcacaagccaccatgccaggggaatttttgcattttttgtagagatggggtttcgcccctttgcccaggctgtatttctctcaaagtcaagtcctataccacatttgttgctgttcttcttaagatactttgtaagtaacaggaagacaagaaaagaacaaaaaaaaagtcaccctccatagcataacatttttatctttaaataattttttaaagtttacatgaagaaaaaccctgcataatccatcacttcctctttttaaaccaaaactctcaggaaaatactgagagtaaataactgattttaactaacataaaagaaaaatatatatactgtactttgcaacctggataaattaaagcgttagcaaaaggtatgtgctttttatccactggggaaaacaaggcttattatgttacacttccaggtttttaagacagttggaagccggttctctgaatagttgctgtcatctcctagatactttctagtactttcaattttgaagcaattatttacattctaaagtgatttattttcctctctttctttgctacatttcatttcttctggttctcaatgaccatctctactttggcttaattatattcatttacaaatattttctgagtacctgctaccgtgtggaaagaactggttgaggtgccttaagaaatactcatatgaagaaaacacaagtctctaatctcaaggcacttaaaatctaataaatgggataaaataagcaaacaaaaaattatatgacataaaatccacaccataagaaaagtaaaaacccagagtgatagaaaggcaaagagtaatcacatttgttttaaagggaccaagaagctttaaagagcaagagatttttgagaaatacccttaagaagaggccaattttcaattgatacacaaagaagacgatgacattttaggcttttaggagatcttaagtaaaagtatagaggtctgaaaattggaagcagtctcatttagccggtccaatagaaaatgagatatgaaagataagttagagccataacataaaaaatcaggaatgaaaaactaataagcttatatttcactcatttactcacttgttcatttaatcaaaaacacatactgaataccaacaatgagtaaagacaggagattcggtcatttggtgatagaaagtcattattctcaaggtcctcaaaatccaataagagaaacagatatatgaagagataattacaatatatgcaaaaggtaccttagggacacagttgaagggcattatccaaagtaatagaagccttcttagaagtgagtaatccacaaattgagtcaaagagttaacagatgttaaccagaataagaaaaggaaaatcattctttctgagggaacagcattagcaaagccaaacaagtaagaaacaattgggtataagctaaagttaaatgtttccagaatttttggagcggcataaagcaagaagtgcccaaacaagaggctatagagggcaggggccagatcatgaagaatcattttaggagtctggctcctggtttaaaacctatgtgtgatttttttcaggccttaccatgggtagttacaaaacctttacctggcaggcctcacagagaaaagctgtactccccacatcagacttgatgtacagcgaatgctttgcatctctggcgggagttgcagctaaggtcttaggcctctctggccagttatgctctttgcacatttacattcctagccctgatgaattgattcttgggtctgtatctgaaaccttggcctaagatcctctccaggcatctcttcctagaactccttacttggagaggaagggaaaactctgaagacagtattccctactctgattcagcctgttccaagaccaccccgctagcccttcctctgacctcgtgtccataaaactaccagagtctttagtttcaagtttcttcaacaataagatgactctcacatctgcgcagatccacactaacccttgaaaagcatgccattctatggcgggaaatggaatggggagtcaaccccttccttcggatttagactcttgctaataccatcatagttaatgattaaaggcttaccctttcatttttggcttgttactttaattggctactcctacacctgacagttcaactctcccagctcagcttaggccatggccatgtcatgttaaggagcttgggttttaccctatagcaatggggagatattgaagagttttaagtaggtattataactgcagataaatagaaaattagactatagggaagaaatatcttaaatatcactttcacaagaaagtggaaaaaaaagtaagaaagttattggaataaacaacatgtaatgagagccttcaatactaatttttaaatttctatttttcagatttatcctatcaaggttttattgaaacttgcctaaaattgtctatgatacaaggtaggcaataaatataaatgaataagggtatgaaagaaaagctcaagcatacagccattttgttcacaacaaaatagtttccaaaccatgtgatgtacaaagttaattaaatgttacatggaaaaagtagacctataattgaagtagagatcaaagtcctaaagctaagtgtagagatgaaaaaagaacataggaaaggtccaataggtgatatatcacctcagcccagaaaggacatacatgtaatctactcacattccactcatctccctaagtcatgtaacactgcaaaagcaatgtgttccctggctgggtagccatttcccagcaaaactttaaactatacaaagaggcatgaaactatggttatcagctggccatatctgtgacagatgacaataagtaccaaagacaaaacagaaaaaagggacagaaaatacaagggaggtaatagggaacatgttaacatctcaagtaagatgcttagaaataattttctgaaagcaacctttgagcaaagacttgaaggaggtgaaggtgtcagttatgcagatatcttaaagcaaaaggatttccggcagggaaaacagtaatgcaaaggccctgaggcagacacacttggtgaaatgatggaatgtaggaggccattttggatacataaagaataacagagttaagtagaaatcaaatagtttctaagagggccaaatcatttaagtcttcataggttataacaagaatttgacttttattctctgtggaatgagacattagaagattataagcaaagaattgatgagacctgacatgttttaacgtgatcactccagctcctgcaagagcctggctgtgagtggaaagagtgtccagtttataggcttttgcaataatccaggagagagagacgatgtctgggaacaaatagcagcagtggaagtagtaaaaagtcattgaattatggatatatattgaaggttgagtcaaaagaatatgctaacagatcatatatgggatgtgagagaagaggaggcactgatattacaagtactttgatctgagaaaataaaagaactgaccctgagaaaaaagagaatgtgagaggaataggttttaataaagaaagtctaaaatttggttttaaacatgttttattcagggtgcctattagaaatctggggcagaaaagggctaactatttgccaaatcccttttcatcttcttcttaggcacacaactagaccatatttcccaatctcctttgcaattaagtatggcaatatgactgagttgtagccagtgacatgcaagcagaagtgattgaggcacacttccaaacccggccaataaaactttccacatacaactggccatgctctaccaccttccactgttttgatgcagatgaatggggcactcttggaagccaagaactaaggataatggagctataagatgaaggaaattatccaccagaaacatgttataaaatttatatgaaacagaaattatgttctattatgatcggacactgactgagatttggaatctatccactaaagcagttaccactgcccaaactaacacagatatccaagctgagatattcagtaaacaactgaatataagagtgtggagttcaaaggaaagaacctgacaggatatataattcgagagacattgatgactagtgtttacataatacaggtgtggactggctcagactttcaagcaagtgaccaaagctggagaagaaaatggaaaagtaaaagtacaaagagtaaggcctgtaccagctcaacaataaagagattgaaaagacgaggaagaaccagcaaggaattttgaagagaggccagtagtaagaggaacacctgtttactcatctcatattggcagtaagaagaaaacaagaaaaatacagtgtcccagaaaccaaatgaaaaaaatgtgtcaaggagaaggtagtaatcaaccatatcaaagggtatcaaaaagtcaagtaagaagaaaactgagacttgactattggatttatttatttatttatttaaagactagtcaatgactattggatttaacaatattgatgtctctggtgaccttgaaaagaacagcttcagtatatggtgggaaaagagcttgagtgaagcaagttcaagagagaataggagaagagaaactcagcaagtagaaataaatctttcagttattcaactgtagtacagaagtcacttaaattatatactggatttagtacattataaacatttgggggggaaagcatgaatgcaaataatccaccaaatggtactttacaaatgccatagaattttacaacataaagagattctagtagaccctgacacatcgtaagaatacactagatatagagaaatataatttgaaaagataaaaagtcaaaatcacaaagcctgcaaacttctaagggcttattcatgttcagttcattaacctgcaaaggcaagtttagtacattttgtcagcaagcttgtcaactagggtttatacttcaaatactgacactcaagtatcaatattcaactttgaggagaatcaaaaagttaagagaaagattaagaaaaaatggttcctgaaaaaaaattcattgatgggagctgaaatagctctaacaagcagcaatactatctatgttaatttcaagaactaaaatatgaactatctcaaaaaacctcataaagaaacaaatatgatttaacgataaaacacttaatctagacatttaaaatgaataatctggacatttaatctagacatttaaaatctagacttttaaaatgaataacaagtagcgctggctggacactggcctcacgcctgtaatcccagcactttgggaggccaaggtgggcagatcacctgaggtcaggagtttgggaccaggctggccaacatggtgaaaccctgtctctactaaaaattcaaaaattagctgggcatggtggcaggcgcctgtaatcccagctactccagaggctgaggcaggagaatcgcttgaacccgagaggcggaggttgcagtgagcagagattgcaccattgtactccagcctgggcaacaagaatgagacttcgtctcaaaaaaaaaaaatggctctatcaattcaaacaacttaatgtctatgtgagagctttcctatattccgcctgaggtacacagaagccatataggctacgcatcaattttcttttaccagttcattgctatagccactaaacctcgtctattaatcacaaagacacattaaaatgcactgttcggctaagcacagtggctcatgactgaaatcccagcactttgggaggccaaggtgggccagactgcttgagcccaggagttcaacaccaacctgggcaacatggtgaaaccccatctctacaaaaaatacaaaaagctgagtgagatggtgcgagcctgtagtcccagccactcaggaggctgaggtgggaggatcgattgagcctggggaggttgaggctgcagtgaggcatgatcatcctactgcacatccagcctgggtgacagagcagagcaagatcctgtctcaaacaaaaaaaaaagaactcttagattctgatagtttctcttcttgcctttataatcacacagtataatcagcttctgcaaattactattgttgaaagtttacttttcattattctgcttcattcatttagttatatgtgctcggctagggatatagcatggggaaaacaaatgaagaccctgctctcatatcacttatactcttgtctatctgaaagactctctgtcccaaaaaggatcttgcatggaaaaaaagtcatcttttagtaaatgaggattatgcaggctaacaaaagcataaatgaaatgtaaaaatattccaaagggttcatgagattccctcaactttgtttatattaggaaacagaaaaattaagttatttgagttgtagctcttctctttcaactcctaatctttggaaacctggaatagttttttattttttaaagttaaaaaagtataaagccctaagtttagaaataatttatataaaaaattagttgcaccctctcaagaacaagccaatattttcagtgctaatctcttcaaacagcaataaactatattatgtcctagtcagttcattagttttactgcaaatatatgacaagtaagctttctggtctgctatagcattttctttagctacagaagtgttaaaaatgctgtttattttaattatgtagtaaattcacaataaacattatgtatacatatattatgtatatgtgtgtatgtatatatatatatatatatatatacacacatacacacacatatatatatcctaattcagcagttttaatcaaaagacaaatatgcacttaagtctactaaaagaaataatcatgttagagagagagaacaccaagaataacctctacattttaatttgctggagaaataaatgcagccatacctggaaaaaatgcattaaattttaaaagcaaagtcattatttctaagttttataagtttattatcaatgcaagtttaaaaagaaaataaaatcacagagaggtacatgtttaaataccttatggtttcattttacacttctcatatcaggatgaagtcttaaaagtaattcaaaaggaaaatgaaagtatttgcccagacgatagagtccatatgttcttcaatctggaaatccattgggaaaaaggcttgagtttttaaaaactgaattttgacaattggaagctgatgtggctttttttccctctccaggaagatttgagtcattctcagagggaatgaaatagacctttatcaagtattgcaaagcttaacacctgtttaactccaaattacttagaaaacatttagttagtcttcagaatctcaaaataagggttgttataaacacttttcctaacagtaagatgttttttaagtttagcaagaaggcgtatctacatattcaagtctgtttatatttcatattctacagatatcaaccatcttgtaacagtctatttgttattactatacagattcctatataattttgttattcctaagattataagtaggctgtaattaaataactagttgaacatccatcataccattaggctccacaactgagggcagtctggttcttccccactgtttgtatgaatcccaagcttctagcacaagaagaagcaactagtatgcacttaaataaagcccatcaaaatgataaatatgtaccctactctgatcattctttcatagatctaaaatgaagctaacatattcaaagttaaaatgagtttgctctcaaaatcaaggtagaaaatagactggagttcttacaggagcctcagttttacacaacatagcacaaattggataacttgtgctccactactaatgtataaaattcctaaatgaatgtaatttaactacaaaaaatttattgtattcctattatgtaaaaagaaatttgctaaactatactgacatattaaatacctagattaaaaacgttaatgtttcgttaatggatcaaaaattacatcagagttaaagtaactacaatagtgtatttttaaaaaaaacatttctcaaaacatatacaaatggccaacaaacatatgaaaaaatgctcaacatcactaatcatcacagaaatgcaaattaaaaccacaatgagataccaccctactcctgcaagaatggccattattaaaaagtcaaaaaacagtagatgttggcatggatgtggtgaaaagggaatgcatatactctgctggtgggaatgtaaattaatacaacctctatggaaaactgtttggaaatttcttaaagaattaaaagtaggtctaccattcaatcaagcaatcacactactgggtatctatctgaagggaaatcagtcattacatcaaaaagacatctgcaagcatatgtttattgcagcacaattcacagctgcaaagatacggaatcaacctaagtgcccatcgaacaatgaatggataaagaaaatgtggtatgtatacaccatggaatactactcagccataaaaaagaatgaaataatgtcttttgcaacaacttggatggaggtgtaggccattattctaagagaagtaactgaggaatggaaaaccaaataccacatattctcacttataagtgggagctaagctacgagtacacaagggcacacagagtgatataatggactatggggactcagaaggggtaggaccagtggagaggcaaggaataacaacctccatattgggtacaatgtacactacttgggtgactagtgcactaaaatctcagacttcacctctatacaattcatccatgtaaccacttgtactccaaaagttgttgaaatgaaaaaaaaacttagagccacatattagttttgaaatttttttggagaaatttaattgtactctgctgtttgataaaaagtgctcaccagcaatcttatgttctggctcctttgcctccaacttctttcccttcttcggaaaaaaaaaaatgcaataaaataaaggataaagagtgcaaaagattttttaataagaactctcagtaaaagcaattgcatgaaaatggaaattactggcagtaagtggtctccaaacatctgctttgaaagatattttttataatgattcaaatgctctttttatacatgatctcccttatcatttaagctaatttttttaacttttaggagttgtatttttaaaaactgtgggcttcctatttttctttattcctcaacaaatgtttgtatattgtaagttgtgctctcatacatacttgttaaaaagcttaattatgtcactacataatagtactataaaagcaacacagtgtgaaaaacagcactagagtactagttagagcactagttagaacagcactagttctgattttataattaaatacctgttggatctttagcaaactcatataacctacttgggtctcagtctccttttcaataaaataaatgagctgaattaaataatctttacctccctaacaccttaaaagtgctaccattttgatatactacttaaaaaatatatttcatttttagttatactccatacacttgcctgtatgttcaaaatcattacttccagttcctcagaaatctcaaaaaatactgctgaaggaaatggaattaatttttactttcctattatgtatttctcttgggagtaaggaggacagaatgcaataaaatacaactatttgtgcagttgtgcgatgtcttagcttgtactgagggcaatgctgtatgcacccttttgatcaatgtaaagaaggtctagcatagataaacttccctacatggaaaccaaaacagttgggttgactttttctttctccttgccacctaaaactgtgggacatactagagatgaagaagtaagggtaaattaaacttttgtaagcatacaggaaagcaagcagcagcatgtttatttttctttaccctgttgaatgtcatgggctagaaagacactgaagttgtgaaggaagggaggcaacatgtttaaaaactcaataccaagttttataatgcaatggcctgtttagaatatttaaagatatggacatgagatgtactgagcacatgaaaataagtagaccatcaaaagagcagaaattatgaggaatttctaaaagacagatcatgtgtaactccagcactttgggaggctgaggcagaaggatcacttgagcctagaaggtcaagaccagtctaggcaatatatcaagatcccatctctacaaaagttataaaaagtagccacaatggtggcacattcttgtagtcccagttacttgagaggctaaagcaggaggatcattgtgcccaagagtttcatgctgcagtgagctacaattgtgccactgcacaccagcctgagcaacagaggaagaccctgtctataaaaaagaaaagaaatctagtaggatcaactggaaggtaaaatcccagacacatggaagataagtactcttccgggggaaaatgcgggagcttcagcctaaaggcaacagatggaaacggtgggtgaagacaacagtcacctaaatcaatcttttttttttttttttttttttttttttgagacggagtcttgctctttcaccaggccggagtgcagtggcactatctcggctcactgcaagctccgcctcctgggttcaggccattctcctgcctcagcctcctgagtagctgggactacaggcgcccgccaccgcgcccagctaatttgttgtatttttagtagagatggggtttcaccgtgttagccaggatggtctcgatctcctgacctcgtgatccacccgcctcggcctcccaaagtgttgggattacaggcgtgagccaccgcgcccggccaacaatcttaaggctgatttcctctctccccttcccttacttctgctgggctgcaagcaagattgcccacccttggctaaaggcatatgtactcttggattagaagaagggcagattcctagctagctactgatgaccaaaaagaataggaagcactgctggtagaagaccattactgacaaatctttcctggcggtacattcaaaccttgccccacaagggcattctgacagtatttaacaaaatttgtattgcaaataactccttttgacttagtgacttcacttctaggtatgtatcctaatagaaatgctcacacatattcattcagaaagatgaatctgacaagattgcagcacctctaaataaagaaaaattagaagccagctaaatgtccaccagtagaaaagctaaaataaactatatattttcatactattaaatagtatatgcctgttaaaaaataatgaggtagatatacataaaatagcattgaatataagaaaaaagttagtagctaatatactatacacagcatagccacatttatatttttaaaatagtgtgtttataaatgcaaaagaggaaaccagaagactatacatcaaactatttacctcctcaccactaggagactttctgggtagggataagtactaaagagaattttcacataataattgaatattttacaatgagaatgcatttctatataccccttatacttgaaaaagaaaaaaaaatcttgccaatttgaatcgtgaactgagaagaatgttccccacctagataagaaaattttatacaatttatctaacaaaaattttaaaataatatccacagcactctattttttattttatgttattattattatactttaagttttagggtacatgtgcacaatgtgcaggttagttacatatgtatacatgtgccatgctggtgtgccacagcactctattaactttagtatgttatagataactgaactaccctctaccacaacatacacataccaaaaaggtacaaactatatgaacagattacattattgttttcatttcgtaaacatattcaagtaaaatgtttttaaaatctatttctttttaaaatttaaatgtcattcatgcaaatacttgttttgtgacaactatgaactaactgcattctcatggtttcctagcacaataacaagaaatatacatgtttgaaaccctgactgttgctcaaacaatttgaattcagaatatgaaaatgcagtcattcactgcctttcctctgtataacaatgccaaaccctacctccctatcaaaaaaaaaaaaaaaattgaaacccaggctgggcaatggagtgagagactctgtctcaaaataaaaataaaaataaaaataaaatccccacaaacacaaacactattcccttttcactcatacaagggcttatgtgtttcccttctctaagttctgctttctcctgtcagaattctattctctcccttgtcactatatgaacaggaaaaacatatcaaacctaaagttatccaaagagaagaaaaatttctaccataatcttgaacaacaaatgtgtttaaatattgtttagtagaattttatactaatgtttatacatgtttataaactacacatatttatacaactaatgcgtatataaaaataaattttaattaaaactagataaaggaattaaaaatgtcagatccacaaaaaaagcatgtgatgtaaagcatatctttactcaattttgccactccacattgtatatatatttcaaaacattatattgtacataaatatgtacaacttttgtcaattaaaagtaattaaggtttttaaaatgtcaaacacattttttaacttacaagtttttagataacaaagaatacaataataattcaaacagatgatcctgaagtgattttcagaaagaaacactcattttatattggattgtttggctttttctatctatttataagagctctttgtagtcaaggaaaataactagaaaataggtttttggaagacacaaattgaaaaatgtatgttaatactttagaacaattaccaggagtaggaaatagtgggtgagaagtgctattactttagaacaattaccaggagtaggaaatagtgggtgagaagtgctatgtcaagtatggaatgtgtcgaaatctccagaagaggttttctaactataaaggccacttgatcccccacaatcaccttttgaaatctactacaagcaaatttaccaagagatatacatcatacaagtgaccagagtggaggcagtgtggatgccaactactgcttttagactacaggtgactgataaaataaagccgtatcttcaaagctttttcaaggagcaggcagaattatattttatctcaaatgagcaaaaagtaacatttttagaatagcagaaaatctccaagttatctaaaattatttgtaaaatattatatgcagctatgctcaatatcttaatctaacttgaaaacctgctccactgttcacaaacaatcttgggtttcacagaaagagatattataatttaacacagtgcctctcaatcttgcatgagcattagatttacctgggaagctttataaaaatattcatgcccaatcagcatctcttgtggtggaatcctggtaccgagattatatatatatatatatataattattattattttttttttgagacagtttcgctctttgttgcccaggctggagtgcagtggcgcaagctcagctcactgcaacctccacctcccgggttagagtgattctcctgtctcagcctgccgagtagctgggattacaggcacccaccaccacacccggctaatttttgtatttttagtagagacagggtttcgccatgttggccaggctggtcttgaactcctgacctcagccccccaaagtgctgagattacaggtgtgagccacagtccttggccggatatattttttttttttggaagctttccatgggattctaatgtctagccaggatgaaaaaacaattggattaatcaaacgaactggcctggatgctatatattcgtctttgatttttctatgctactgagcagctgtggaaacttgggtatttaacacaatattctgcatcttaattctctcactctgtagtatgaactgacctggcttaacatgatgcccagggatccttttggctttaaagttgtttgattagacccttcaaaactggcacctacatttaacatctaaaaagtgcttcaaataaaagttaaacctcataacatatatactaaaattttacagttaaggttttccacatttgcaaatcccatgtgcagaactgtatttatcaaaataagttttaatagcttgttattaagatgttgttactatgtgtttatcaatacaacattaattcctatgaaatcctatccttcactgaaaaatatgaagtcatcttcatactctaggggtacattttcagtatcacataccattaagagttattctttgtggtaacatatatcaagaaaaaaacaaaaaagaagagactgtagtttttatgtaaagggttttcatcaaaaccaataactaatttatagaaaaaaatggcactagactttagaaattaaatacatatgtaaagaagtattcatttaaaaagccatttttaacaaattaagatttcactgccacatattagataagatttaaattgcttctgtttaaacacttggaaatgggattaccattagaagagcaagaaaaccttaattccgtatcaaaaactttaattaaagctatataacttgtgattaattacttatatttgattcaaattgaaagacaatacattcttttttaaaagataatattctttttttaaaacagtaactcacttcttctaaaatcatacatacatcaagatggcaacacttatgttaatgtaaaataatcacctttcatttatcagaacatattggcaagggcaaatttttcagtcatatagttttgtaaaacaaaatgtaagtttatgctcaacatctcatattagccttaggaaaacaaatctgaaaaaaaactaaagcacattttaaagctacatacaagtcattttgggctgctcagtattcctggtcctatttcaacaaaacacaaaatgagagcctgactgtgtgctgaaaattaataagtatgcaaataataaaacttcaatataatattctaaggtactcctgactgtgtgctgaaaattaataagtatgcaaataacaaaacttcaatataatattctaaggtactttgacaaaaaaattctacaataaatgacatataacaaggcttaacttagttctatttttatggtataaatgttaaatcattattagtataaacacaagggtagttaatcttgaaaatattttctatagaacatcacttgaattttgaattattttcaaacatgactttaaaattaaggtcaaaattagcaatctaaaatactgtaattaaaagaaagcaaattcccaaaactaaatagaaagtatattcagccctcataagacatatgaaatatttacataataatatgtaagatatatttcttgttgcaacaaattatgcaaggttggaattagtcttgatgcaaaatgatattaccaattcttttcaaatattacagttcttacattccttttacatttccaaatcataagactacttaatagatgtaaaaatataaagtactggaatgtcttttttgccctaatatttaggaagaaaagagaattctaaggaataaaacattcagttaaaaatatgtttccccttctactttgaccctctttgaagtcaacttttcaaggtccattatcagatggaatgcagtagtaaagattttatgacactatactaaatttttattatttcattgagaaaaattgtaataataaaaaggattaagatctatttcctttttcgccatgttaagcttttaagctttttttgctttcatcaattccaatataccataaatcaaaagtattcttcttttaatcccaacagttgacaaaataatgcattttacacttgaatatgctcaaggaaaaaaattaacattctttatcatttcccaacagagacagttaatactctaaggccacattaatagaatctttctgccattgtagaaagtttgatagcactcctatttcaatgtctgaatttttctcctttttttgacaaagacaaatgattgccatcaatcaagatccaatcgggtatagagagagtcaggcaaatgcatcactctttactggttttcttgttatttgagcaggctttgctccatattattttatagaatgatcaaaaaacagccataagatagatcattcacacccactgtaaaattaactttcacgaataatgagttttaaacctcagataatgtatatgttataccaacgatattactgagttcattcctggctagagattatgtaaatgataccatatgacctttatcattacaacaggacatgcaaaacacatattatttcatacatcattttaaagcaagtcagtttctaaaggaaaaatcatcatttataatctgcatggtgaagtgttaaagttttgaaagaaagaagtatctctgaaccatgagtccttcttttaacctgttacttccattgaacataaggcaataaaacctactagttcaaaaagatgtacttgatttctgtatttctttgttgagctactgttaatgtcatttcaaaaactcatatcatgttggctaatcaacactaagttttaaatggataacaagtattaatatacacttctaagtcattcctctcaaaatttttgctgttgtttttgagaaagggtctctgtcacccaagcttgactgtagtggcttgatgatagctcagtgtagcctcaaactcttgggctcaaatgatcctcctgcctcatcccccaggcaactgggactacagctcaatgtcaccacagctgttttgtttttgtttttgttcttttgtagagaccagatctcactatattgcccaggctggtctcaaacttctggtctcaagcaatcctcctgcctcagcctcactacgtgctgagattacagttgtggtccactgcatccagcctcaaaatgtcaatgtaatgggttaaggaagtaaaggaaaacattccaatactgtttctttagaactatattctgccaatcttaaaatactaaaaatgtaagtataaactacaacggcccaccaattataaaatagctcctttttttaaaggtataggccaggaacagtggctcatgcctgtaatcccagcactctgggaggccaaagcaggtggatcacttgaggtcaggagttcgagaccagcctggccaacatggtgaaaccccacctctactaaaaatacaaaaattagcagggcatggtggcacatgcctgtagtcccagctacttgggaggctgaggcaggaagatcacttgaacccaggaggcgaaggttgcagtgagccaaggtcacactactgtactacagcctgggtggtgacagagcaagaccctgtgtaaacaaaataaaacaataaaaaggtatataaagaaatacatattgcaagccaggcatggtggctcacgcctgtaatcccagcactttgggaggccgagctgcatggattgcctgaagtcaggagttccagaccagcctggccaacatgatgaaactccatctctactaaaaatacaaaaaattagctacgcatggtggtgggcacctgtaatcccagctacttgtgaggctgaggcaagagaatcacttgaaccctggaggcggaggttgcagtagccaaggccacgacattgcactccagccagggcaacaagagcaaaactcagtatcaaaaaacaacaacaacaacaaaaacatattgcaaacccagctcccttctgttgtaattccacccccatcatgttgacacagttatccacagaatcacccaagcacaaagcctgtatatcatctttgaaccctccctctccttaagcttcttacaatgaactttcaattgttttttcctaaataattttcaatccatgcccactaccacagttctgccatatctcatgcctagtctactgttattataacacctatgatttcactattggcagtgtttttcttcttcaaatctataatcaaaaagaactaccagaatgatctatcctaaaaagatgtgttgacatcaatagtttactccacaaatttcaatagcactacatcccttacagcagcgatgcccaaaggggatacataacataattcatctggatgttggaagataattgcagagaaaaaagtcagaaattgagctttattaatatttaatatatagtttaattctggcatccttattcagtctgaatatcagtaatcatgtcatatgtgatatgcaattttctcatattaacacatactgtagtttatgtctacttaaacaggtttacagattacactgttttaaacaaatacagtatttagaatactttgcaataagataaaaagtgaccagaaattacctaataatggttgaatagtatgataatactcaattatcttaaaaagccaattattccaaatttgctaaacttttctgtggcagtgcactgcaacaagctctgaaacagctatttgaaaataaacacataaaatatatacctttaacataaaggtagcattttaactctaaggtaactaccttagaaaaacatactatggaaagagatgtttagaaatatttccatcattatgtgatttttgttgcctaaaactatcttaaccacctataaaaactcttaaatttgtattttaattaaaacaaattagaaacagtgtcataacctagtgtgtcaatgggttttgtacaaacataatgtctgtaaaaacattaaaatattaatacaaatatttgaagagaaccaagagttttgtaaagttagatagtccttaaaatattttctttggctttattttatcctttaatttctcctagaaatagtggcaatattcaacacttgctttaaagatttcagagtttagactattcttgatctttaaaaaaaaaaaagtaaatgcagagaggataatattatctatcttataaggtaatttaacaagatatatggacttagtaaagggatctctaactagtaacattaagttgctgctgctactactaccattcctaacatttttattagtatgtagtacaccaaaaaagggacttgtttctcggaatgagagtataaaacattaggagtaatttatgagaaaattggagtggaaggcatccaatttaggaacatgttaagttatataggaaaaattgatttatcattttgaagcaaaccacaagaccctctgcatgaatggcatatatgaaaatgttttaagatgagaataaattgtcttaaatttcgatatgtattacataatcaccttccaaaaatgtaccagcaatatactcttccatatgagaatgtgtatatcccaaatgtcattaacactgagttaatactggccttattaatctttaccaaacttacaggtgagggatatgaaagagaggagactgttgaatatgaatccaaggttttaagttagattccaatactgatgccattaataaaaacagaaaacaccggaaggaggagagacttgcaaacagagatgaatttagttgggacatgttgagtttgaggggccagaagtacatccacatggaaaaatcaaaaaggttctgaaaacagagatgtggaactaagaagagaggtaaagatcagagtgttgatttgagattcctgtatagaagtgatggttgggctgggcgtggtggctcaagcctataatcccagcactttgggaggccaaggcgggtagatcatttgaggtcgggagtgtgaaaccagcctggccaacatgttgaaaccccttctctactaaaaatacaaaaattagccaggcatggtggcaggcacctgtaatcccagctacttgggaggctgaggcaggagaattgcttgagcccaggaggcagaggttgcagtgagcagagatcatgccattgcactccagcctgggagacagagtgagactctgtctcaaggaaaaaaaaaaaaaaaagtgatggctgaggtgctagcagagattaggatcacaaaagaactaatttagaaaaagaaaaataccagcaacagaatttttctgggacaactctaaatagcagaattaggcaaaagcaagctccaaggacacaatgctcatcttgctaatccctgttacagtgatgcctggcaaagagccttgctcagagtaggtattcaataaaaacttgttgcatgcactatttaataattaataagagacagagtcatcagaacaaaagagaactagaagcaaacaagtcaaataagatttttttaaaaattagacaccattaggcttggtgctcccaaaaacattattcaaccacaatgaactactttccatcccatgggcttatcctagctctcctcctatctctctctcatgtgtactctctcatgttgcccctgtcctgtggcatcttccccaccaaccatgtttcaccctatctgcctgctaccaattatcatccaacaactaagtctcagcttagatgtcagctcctacaggtaattttgatctcagcaatttatacttgctgcatcatagcagttattcaactactttatcattgcctgtttatatttttccccctccaagtctataagctctgtagtttttatacctaatcatcttagccactaagttagagtttctttctaggccattccttttctcaccctatattctctcatcctatgatctcatccaaacttttggctataattacccacatgtatgtgaactccaaaatttatatacccagcgaaaatctccttttgagttctagagccatatatctaaatgtttacttgctatatagtttagcagttaagaacatgaaatcaaacacagtatttttaaattctgggtttgccagttattagctatgttattagctgtgtgaacaagacatttaacatctctgtacttcaactgccttacctataaaatgagaataacaataaaaagagaacctaattcataaggttgttgggcagattatataaaacaatatttaaagtgcttacaatagtgctttgcatataagaaatacttcttgagtgctaaatattgtaataatgttaattcagtgaaggcagtgattttcatttcttttgttcactgtctaatccccaaatctttagacaatggctgacacactactgaatagttgttgaataaatgaatgaataaatccatctcaatttcaacacagtcaaaaccaaattaatgaccttccccacaattagtccccttcaatgtgaaaggcatcgtagttcatccagttgtgcaagtctacacaatctttgttctacacactgcagtcagggggttctcagagcataacactaatcatgttccccatcctttccatcataaaatctttatggctccttattcctctttagaaaagcacccaatatggccataaggcctcgtgtaatctggctactatcaatatctccacagtacacacatccactcactatccacgttccagctatataacctttcttctggtccttgtactcaggcttcttgtttaaatacctctgctggtcggatgcggtggctcacacctgtaatcccagcactttgggaggccgaggtgggtggatcacctgaggtcaggagttcgagactagcctggccaacatagtgaaaccccatctctactaaaaatacaaaaattagttgggcgtggtggcgggtgcctgtaattccagttactcggatggctgagccaggaaaatcacctgaaaccaggaggcagaggttgcagtgaaccaagatcgcaccattgcactccagcctgggtgacaagagcaaaactccatctctgaatggagttttcccgtcttcatctagctacctcctactaactcttcaaattccaattgaattgttacttcaaagataacttaccagagctctttaactagatatcaattgaaggcattcatcattcagttttgtcattcttcatagcattttcacaacagtaaatttgtatctgttttataatattaatagctgtctctccttctggataatgaaatctatgtaaactgggaacatgtccacttctgtttattatgggagctctgaggcatagcatagtgactggcacataacaggtgaatattcactgactattcaatcaataagataaaagccaattaaatttttttatcttattcaatgaacaagataaaattcaagtaaccataggatttaaggaagcagtatgaatagggatgaagaaggtaactataaattcaattcatgacgtccatttgaacagtaataagctatcccacacaatactattgtgaaggatctgacactacctgttcatatatttcttctttgcattcttttttcagattccagaatatagtctcacctgtttttctccctcattttcctttctgaatcttggcttctgttctgcagtggacaggcatttgcaaacatacccctaaaggtggaggaagctaactgaccaaacaaagaggctgataaatacagtttctcagaaagaaacatttaatagggacttaaaacagaagccgtagtcttaagcagtcataagactctagagggtggatccctgcaccactgccccctagacccagggcgtatataccatagagaaagaatgtgtaggacaattgaagttgacctctcagggaaaggcaagcatgctatgtgaatctgcctaagcgggggatttatgatcaaggttgtttggacctggggcaggatttatggtaacaatagataaaagtagaaatcttagaggcatttccagaacagaggttaatcagaagtcaacatggcagattagcatccgagacggagtttctttagcctccacagcttctctacttttcctttcaaattctgctcctagattctaccataaggctgtttttcttacaaaccaggaatatcagcatgactcctgcaactaaaaccatcacctatgtgacaatggtaccaaatctcaactctttactccagatttttctcataagactgcgttttcaaactgtttaataacatttccattttgcttacccaaatatatgttaatgtgtcccaatattaaaaacagtatcctatttctaacttgttccttcttctatatttccataccactatcattattctctccaccattttccctctctgcctctaacacataacacccccaaccatctctcttcttcctaccagggtttgtctttcatctccacaggttttaaggcttgttgtatatgaacttgttaaattcttatggagagggcaaaccttatttctttttttattttgaaaatgtttcaaatttgtagaaaagtggaaaatggtaacatgatgccccattgacaacagatactttctataaacaaggactttgttctacataataataatataactgaaagtcaggaaactaaaactgatacattattaccttccgattttaagcaccactcaaattttactaattaccccagtaatccttatagcaagatgacacagctgagaatcatgtctggcattgagttattatgtctctttattctctaacaatctggcagaatagttctatagtctttcctgaaattttaagacactgacatttagatgattacaggtcaattattttgtagaatgtccctcaatttgggtttaactcatatttcttctacatttcttctacatgattagactcagactaggcactctgggcatatcacagagtgatactatgatcttcttaatagatatagcctaaaaggaagcacatggtttcagtttctctaattactaatgatgtccattttgatcacttgatgacatggtacctaccaagcttttttttttttttttttttacgtgaattactctttctccctttgtaattaatgaatattttttgaggaggtactttggaactatgcaaattttctgatcttcatcaaactttccatttgttcatttatttatattagtatgatcttctattttattcaacggattataatttattgctatctattagataatattatctattttgacgtttgactgttcactgatttggccagtgggattcttttcaagctgattctttttccttcttacatgtctccatcattctttgagcacttctttacattctagcacaaaaaggtgctatgagctcatcttatagtttccctgccacagtcctggaagtagccattgctccacagagccctggtttcaatggagaagatcaaggctttaggtgcattcattgctaccaggatgtcactattcccaggccccctcagtggacaaagctaggaaatatatccagctgggcacgatggctcatgcccgtaatcccagtactttattgcccagctggagtgcagtgacacaatcacgattcactgcagcctcagcctcctaggctcaagcgatccttctgcctcagcctcccaagtaattggcaccacagacatgcactactacacctggctaatttttaaattttgtataaagatgaagtattacttttgttgctcaggctggtctcaaacttctgaattcaagcaatcctccacctctgcctcccaaaatgctgggattacaggcgtgaactatcacacctggcttaagtttattttttgatgccaataatatgtctagaagggactagactaaaacattaacagtggcttggaaaggatggtgtgattaaaggtaattttttgttcttcttttcatcttacgtgtatttatattttctacagtaaaaatatattattctcataattatataataaatacctgtaggaagcatatggatctctgacattagtaatgaagttgaattattccttctaaaaaaaaaatctaagctttccacatcgtgttacagtggtacattggcaagtatcagtttgccacaaaaaactggggtttattttgggattatctgttctgttccattgatctatacagctatcctatactaatagcatggtgtcttaattactgtatctttaagttttggaattaggtagtgtatatactgaattttgttgtgctttttcaacattgtttcggctgttgtgacagacagctccaacatagcccgtaaatgctccctgcctcctagtgttcatggtcttgacaatccctccttgagtaatttgcttctaaccaatgaaatatggcaacatcaaggggatgtcactccaaaaattaggttacaaatgactgtgatgtccattttgctagatgactcctctctcttgatggctttgatgaagcaagtaagccaccatactggagaagtccctgtggcaaagaactcagggccttagtccaagagccctcaaaggattaaattctgacaacttcataagtgaacttgaaagtggatacttcccagttgagccttcagatgagaacccagcctgcggacaccttgactaaagccatatcagagatggtgggccagaggaaacagctaaatagtgcctggattcttgacccattgcactatgaaataataagtgcatgacgtgttaagctgttaagctttagagtgatttgtaacaaagcaacagattactaatgcagctcttctgggacctttgtatttccatttatcttttgggttccgactaccaatttctattaaaaaaattctgaaacttacataggggattatattgaatctatagatcagtttggggcatactagcatcctacattatactgcataatattctatttgtttacaatttctttaattattttttttttttgcaacctctgcctcctgggttcaagcaattctcctgcctcagcctcccgaaaagctgggattacaggcaagcaccgctatgcctggctaatgttatctttagtagagacaggttttcaccatgttggccaggctggtcttgaactcctgacctcgtgatccacccgcctcagcctaccaaagcgctgggattacaggcgtaagccaccacgcccggccaacttctttaattattatcaatttctctttaatttctctcagtaaagctttatagttttcagtgtaccaacattatacttcctggtattttattctttttgttggcttaaagatttctcacctatatttatgagggacctcatttacttttaacaataaaatgctattttcaagaacacaaaactggggttcagagaatacttaagaacacataaggacatgaacagacacttctcaaaagaagacatttatgcagccaaaaaacacatgaaaaaatgctcatcatcactggccatcagagaaatgcaaatcaaaaccacaatgagataccatctcacaccagttagaatggtgatcattaaaaagtcaggaaacaacaggtgctggagaggatgtggagaaataggaacacttttacactgttggtgggactgtaaactagttcaaccattgtggaagtcagtgtggcgattcctcagggatctagaactagaaataccatttgacccagccatcccattactgggtatatacccaaaggactataaatcatgctgctataaagacacatgcacacgtatgtttattgcggcattattcacaatagcaaagacttggaaccaacccaaatgtccaacaatgatagactggattaagaaaatgtggcacatatacaccatggaatactatgcagccataaaaaatgatgagttcatgtcctttgtagggacatggatgaaattggaaatcatcattctcagtaaactatcgcaagaacaaaaaaccaaacactgcatattctcactcataggtgggaattgaacgatgagatcacacggacacaggaaggggaatatcacactctggggactgtggtggggtaggggaaggggggaggggggagggatagcattgggagataaacctaatgctagatgacgagttagtgggtgcagtgcaccagcatggcacatgtatacatatgtaactaacctgcacaatgtgcacatgtaccctaaaacttaaagtataataaaaaaaaaaaagaaaaaaaaaaacaaagaaaaaaaagaacacataagcaaaacgtgggaataatgagatctaaattaatctatctaaaaataatgcactttctaccccacccgtggtactcaacagattcagaactgttccctagagtgaataatagaaatctgcaaggaaagttttggttgtcacaaatgactgagtgctacaatgatttagtgggcagaaggagcaaaaaaaaaaaaaaaaaaaattctagacattccacaagaagaatagttcaataataataatggtcctagatcctacattactttagaatgttctactgtatatcagtgaaagtgacaaactagaagataatctgagcctatgccccaaatatatatatatatatatatatatatatatatatatatatatatatgtgtgtgtgtatatatatatatatgtgtgtgtgtgtgtatatatatatatatatatatatatatatatatatatatatatatatatatatttagatggagtttcgctcttgctgcccaggctggagtgtaatggtatgatctctgctcactgcaacctccccctcccgggttcaagcgattcttttgcctcagcctcccaagtagctgggattacaggtgcctgccaccatgcccaactaattttttgtatttttagtagagatgggatttcactatgttagccaggctggtcttgaactcctgacctaggcaatcgacccgccttggcctcccaaaatgctgggaatacaggcatgagccaccacgcccggccccaatttatttttaatttcaaaaaatgcaatcattgtgtaaagtaaggtaaaaatgaatgttgtctgcttagtactacaccagtatctattcaccacttagaaaaatcacattatagacaatcacacatcccttgtagcaggacaaatcatacatcatacctctatcagtctgatttgtacctgtcacattcacagtgacctatatataaatacaagcatccaattatgtcttttagcatagttatgttcgtacttatggaacaatgaaatgcatactacatatatttttaaatattttatttctcttgttatggtatagagcactgttgattaatattatttatctagaaaaggtctatttactattcaaaaataaaactcatagataaggaataattgcaaactacctgtgatataaagagcatgttaaatttcagagggtgaagaactatagcattacattatgctacctcctaaatatatctcctgctcaccataatttctggcactgccatagttaatactccttttatctctggtctagtgtcttttgacagcctcctatctagtctccatcacttgaacttcccatccaatataatttacttattgtcgaaatgttactgcttttcctttaaaaaaaattattatccaggatataaaataggatcaagatacttaagttcctactatcctacagaaaaattccaaattctccaccatggcatttaggatcgcttatgacctgcttttatctgtttctagatttgtctacaaccactctctatcacatattatatgtctaaaccatgctttctggactttctcaaaattttcatattttctcatggcaatgccttgcatcacctactccctattctaccatgacttcccatcatcattcctgtccccatcttttgtccgtctggaattcacatactgtgtgacatcctactctagaccctcctcaaatctatgtcctatttcacagagatccaaaagcttacattcagactttttaccatacacatttcgcagtaatataattaattatatgcttaacattcccatgaatcctcaatatcctcaaaatgtaataagaaatttttatattccctaacaatttttatcattggtttttcatatttgttgattcaatgaatatttaactaattttccactctcttcatattctaactttcttttctgaaattctagacattaattacatatatctaaatacataatggcatcaaattctaatttactccacaaaaacacaggaatcacaactcttctaaatatgtcatgatggaaataatgtagtcagtcttgacattcatttctttattaagcagaatctcagcatctttcacacagttaaaataggagaataaatttgcaaataaggtttcatttgcctattttcttttttttctttgcagcaaaaagattaaaaacattttagcccttcaatgtttaagttcaagtggaactatctaaacatcacatcaatcaatacctttatatgttcttctttatatgcacaagggcaagaattagtttaggggtataggagttggttacagtcattatgctctaatgtggcaaacattagtgtcaatttaagtaaactctaaagggttatgaggtcaaaatgcaagactgcataatttatcagatcaagcaaatcactttgaaagtacagaaataagtgaagcatgaggctattactgcctctcatgaataaaggttaataccaatgtttatttattacacactggatggtatttgctatctaaactttatttattaaaataagtattttgctacactgtcatattttaaactactgagtcaaatttaatttacagcactgtcttatactaatacaattaatacagtattctaagttttaaacaaaaaattgaaattgctttggacattttgattagtaaaatatgttacctgtaaaatatgaaatctcacttttgcatcaagacacaccaatgagcaattcaaaagcacaagaatacattcatatgtaaattctgcatgtatttcaaagttgtggtttattatttgttcttgttgtttggtatttctacatagtattttcttatgcacaaaaaatagaaagttgcgggagaatggtataacatactaggccatcaaaaaaagaaagataaagataagcttttaaaattagttgttactctttcttttatgaaagaaaagaatggtattttggttttccataaattaatactaaaatattcatattccattttctaaggtaaacagtaacatgtgaaatgatgtaatagacataatagctgtgaagagtacaggaaaatatattaataggaaagaaatgttacttttccagaacaaatcttaaatgaaatggtgtaattagatgaagggttatgtgaaacatggcaatatacacaagcaaaatcacaatgcagatcaattctgttacttttacattttactctgcatataatatattgaaaaatattatttaatctaaattcaataagatatcaagatttcctcaaaatcaatgttttgtagtcaaatcaactcaaataaaacttcacagttataagacagataattaaactgtattgaagtagatgttttatatagcaaatgttgtttattatggttacaaacacacacataaggaggcaaaagaattactctcaaagaaaaaatgttcaaattctaaagcattggaatagaaaaatgtaatgttatattcgcatcattattgaaatgtagctttaacatgacacttaaaaaaattaatattctagtgatttgtgcaggacctgtatctttcatttaacccacataaaaattttgtacatagactctcttgaagggaaatttaaagttccccctattttatccatttcaaccaacataaagatttcaaataacaacttcaacgcacaagtagtccaattccaggctgggcatatctaaatgaagaaaaaaattgatctgtcatgaataaccattccattttaggaaaatgcagaccattagagttcatttatttattccacaaatatgtactgaatatctaccatatgccaagcactaaggagacaccagtaaacagaagaaattagcaatcaaagaaaaaattaatttataataaaatgtcataaaaagtattatgaaaaaataactttaccatgttaatgcaggctaagagatagtgatggaggcacatagatgataagaaaaggctgacataggaaagtaggtggaagaagaatgggcaaagatgacatgtgagtaaataacctgtatgaagaggatatgtaagctatattgacatttggacaaaaatgctgcatgcatgaagaacatgtgcagaagttctaatacaggagcatggtatgtttactcaagtaatagcaagcagtccagtgttgtcagagcaaaatgatctagtgctcatctaagatcagatcatccagggctttgtacatttcaaaaagatagtttagctgtaatataggataaagagataaaagtggcattaggaaagtaagaatcagcaaactgttgctgcatagcctatgagctaagaatggattgtaaattcataaataattggaaaaaaagatatttcatgatgtgaaaattatataaaattcatatctaagcttccatgaataaatttttattggaacagagccatactcatttgtctaggtactatctgctggttttgcactacaaaagcagagtacgtggtgctctcatcacttagcactgatgctcagcacatttcagatcatactaatgtagctatagatgaccgtgtttcaaatgtcacacatatagccataccacattttatttttattttcttattaccagtgtgtacccatggtattaaaacataaaaaagagaaacgtagactttaaataacatgtttttaaaggcatagtggagtctgaattattttgttttagaattaaatgttaaagcatttttgtttagtatgcagtaacacgatagctagtgattttaaaatataatacacatcaatattaccaaacaaagcactcattataatattgctaatgcataggaatgcagcagtgaaaaacttagaaaatttaaaacaaattatctcatcaaaacagaatctcttcagaaaaattaaaaatgaaaataaggctgcaattaaagcaagcttctgagtgattcttttgttagtcaagcaaaaaaagtcatttacagatggtaagttaattaaactgagtttcatttgacagccaaagaactgtatccagagaaaacaaaattgtttaagaatattatagcctttcagtgaaaacagttgcttaaggagttgaggacattgaagcaaaatcaatagacaattaaaaataaataaataaagcaaatgattccaaatggttttccttggctcttgatgagatcacagatgttacctacataatgttccattgttgtttattcaaggagtaaatgactattttgaagtgattgaaaaacgagcctctgaataatctgcatggaataactatacggatgattttttcaaagttgagaaaacaaaaatttagtaccatctgaagtggaatctgctaggatgtcttataacaaatggtgttaaaagtatgtatgggggagaaaattgaacaacttacaaagtttgtgaaaatatacggtatttaaagcataagcttagtcactgtatcactcagtactctgtattactcaggtaccctgcaaaaaatattggaatttatcatgttttatcgaaccaggagtgtcatggtgaacttcattcacttttttttcatggtcttaaccaatgtcatttccatgcatttttctcagaaatacaagtggaatatactaacttgctcttccacacagcaattcaaaaaaaagtttttttttcttgagatcctgtctcaagaaaaaaaaaaatcttaacagtggtaaggttttattatgattttccgctaagggcatagactgatttttttttttttctgagaaaaaaataactactattatcacacactaaatggttttagaaattagcttttactgaagacataataatgtttcttaataaattccatctaaattacaaggcaaaacagcccatatatgggaaatttacactgcagtaaagtcatttagatgacaacactgtttgaatcacaagtaatatgaagttactttatatacttttctgtgctattaaaagttaaaaagaagtgagattgtcattgtcatacaaatttgcagctaatacattttccagctcaaacttcaatcccagaagtatttttcagatactgatgcaagggcaaaggaaattcccatatttcaaaatccatttaaatgtggtactgcggagcttctactcaaatatcaattgcaactaattaacctataatgtaacggtatgctaaaaggcaaaatcaagagaaaaatctaacaattatataaatgccttccaagagataaacatgctcaattaacatcccatgtccatagatggacattaataattgacaatatttatctgtgtgaaaacatattttaaaagatgaaatccataaaatattatagatcatattaacaggtgaatatttgccatctattttgatgacaggcaacagtaactatgaaccccaattaagtaaaatgttacccgcccccctcccaagaaaaagaaattcttctcattagaaaacccattacagaaaattgtactcaatagatatattttaaattttatcaataaaaatatattaaaatttgctttctgtcttgttacacaggtatttatataatatcctttatcttgccttttgacccaaaaatctaaaatatttactatctggcccattatagaaaaagttttacaatctctgatataagaaaataatgatttttctctagaccaggcaaagcagatgatgggaaatgtccagattctggctatatttttatggtagaaccaataaaatttcctgacatattgtggggtatataagaaagagtgaagacaaagatgacttcagggttttagcatgagcaacgagaaggataaataacagttattgccatgaactgaaactggaaaggctatggatgaataggctggagagtggttcagtattgacatgttaagtttaataaatctaccaaacagaagtggtttaggccaattagatacagaaatctggaattcaggagaggttatcttagcataagatacaaatttgggagtcactggccaataggcggtttttgaaacgttggaaatgaatgagatcacaagggatacttggtaaataaataaatgtcctgagaactgagtatcagggcactaaaacattcaccatttgggaaggtaaggttgatcaggcgaagtcaacagggtgtggaacaatgtctaatcaggtaggacattatgctatcttgaagcaagataaccaaagtgttagcagaaggagaaaatgatcaactgtgtcatatgtcaatagataagcatactcactataggttgcacataccaaattcaaaaatctggaatttgaaatgctaaaaaatccaaaatttttgagcacagacataacatgcaaaagaaatgctcattggagcatttcggacttttggattaggaatgtttgagcggtaagtataatacaaatattccaaaatatgaaaaaaatatgaaatctgaaacacttctggttccaagcatttcagaaaagagatattcagtgtgtatgtgtttatataaagcatagacagtagtgattaacagaacgaagaacatggtcctgaagcaccagaaatgtttctcctttaatctactaatcagtaaaactaatattttagtaaaaatcaggattttagtagtggtgctcctgttcatatttttccatcacatataataaggacagttctggaaaccttgtcaaatgccttgcagaatatgtcaatatgtgtatatcaagaattaaatgttcatattttttaacttagtcattctatttctgggactatagcctgaaaaaaaaataagctaaagtaggaaaatgctttatgactaaagataaaaacctttttccagattatatctgtaaaaagtaaaatgattactttttctttttttttttttttttttttttgagacagggtctcatgctgttgcctagactagagtgtgcaaggcataattattgctcactgtaacctcaacctcctgggctcaaataatcctcctacctcagcctctgtagtagcagggaccacaggtgcataccaacacacctagtagcagggaccacaggtgcataccaacatacccagctaatttttttaaattatgtgttgtagagacagggtctccctatgttgcccaggctggtcttgaactcctgggctcaagcaattttcccacctccttaaatgctgggattacaggcatgagccaccacactcagctcttactttatgctttacactgaacaactcaaagttccttaaagatgtgatgctgaattgttttcctggcaccacactctcagcctaactaaaaagttagtcattactttcaaagacccctccataatcgagatatttatctacatctattattgtggtttatcatattatatcagacatattattaatacgtctttctcatctattgtaagtatccttcctgagagcagggccctgtgcctagcagagtgtgaggttcaataaatgtttactatattcaattatccagtgagtaacttgtaattcaatgttctgagaatagcaggtatttttgctttgtttaggacataaggcaaatgtagagaagtaatagaaaataaagagatacccaagcagcatcaacatttatgagctaggagaaagaaggaggcagtgaggacatcagaagagaaaggaacacaagtagcaaaaaaaaaaaaaaaaaaactagaaaagagcgagatgtgccagaaaccagtggaacaaaataacttgacaaggaagtggtctacacaaacaaatatcataaataaacaaaaattgtaatacagtggttttgacaaagaagagctcacaagacctctgccagagcagtttctggcagacagcaagaggctgacggatgaacaggttgaggccgcagaaagttcaagatctaagaaacctgactgaaggagaaaaaaagagagactatgcagcagactactgttatttagtggttgtacaggaactctacttaaatatcacaggatatttaactacctggattccaacaataaaagtctgcaagctttccagtcattgtgacaatcaaaaacatgcccccccaccccacatttctaaattaccccagaaaggatagagtactgcctctgattgagaacccttaaatgccaactcatgctaaaacaggagtctctttcccatgagattgtttttatggtttaagatgaagcttattagcattttagaaaacgttggcaatacagttacaggggacagtaagtttggggacaatgccaagtagttgagggagctgaaacagagccacgaggcctctattttttcagagatgagttctgctgagagtatccatcacactatagtttcaagtacaacttcctactttcctccacataatcaaatttcttaaaagagatcttctctcttactcctctttagtaatcactcactcattccctaaacctttataatctggcccccactttctccatgctaccaaaacagttctatgataaccagtaccttcttggttccaaatctaaggcccttttcttagacaattttgcttctgatcaccttatagcattggtcactgctccttcttaagaccacttcttctcccaccactgtcctagtttgggcacttgttatctcttaaactataaaatacctctggcctctgccttcccttcagtttctcctaacatttacccattttacaaatgacaagatcttcctgaaacatagttcttaaactgttcctggctcagtaattttaaaatggttgagagaacagaccaaatatcttggccccaatatttaagatccttgacaatcaggtccctgcctatccttctcattttatttctcaccaatctggtttacataccactcgttctagatgagcaattagaactgctgagtgttctctgtacatgctcttctatctgctttctacgctttcacttatcttccttcaacctgaagtaacgcttttgcatcgcatggtcatatatccagttcttcttcacactttgatctataactcctatgtcaaggattccctgacctcatagctacaagcaatagccctacccttcctaaacttccaaagtactttatttgtaccttttttatgtcacctttaaacctgcattatacatttcatataaacatcctgcctctccaataaagttcactaggaactattacttactaagcattaatatcaggtacttacatatatcacactgtatcctctcaatataattgagttaccccaatttaataaatataaaaaacagaggaataggaaatctgtataaactagcaaatactcaatacatattttttaatgaataaattattattccaagatgaagtatcattcaaaatgtttacaaatatgcgggtgtgtttcactttaagtgaaccaaaggtagagctccaagaataaaaaatatttaagaaaagagccaataatagataagaggttgcgttcaaatctaatattaacagttactacttaacttgagcatatatgatttttcaggcacacactttctatatgctaatttattttattctcataacaatcctttagaatagatattgttttcactggccaatacttggtgaggttaagtgactcgttcaaagttgcaaagccaggatacacataaagccagcctttctggctttaaattctttgctctagagtagttagtgagaaggcccaaacagcttaagcttgaaagaaatacaaatttgggcaagtgcttctttttgctttattaatattaacatgtggacatctacaaaacgtaataaggcatttaaaaactgagaaaattttctacttttcccaatttctataaaatgtaatatgttatttaataaccaagaaaacattctattttttcctaatatctctaagcagacattaaaacttgttatttggaatgaatatttgtttccaaatgaacaatgaaagtagtatataataagtaacaaagcaccaaatagagtaaggaatctcaaaactcaaaactgaaaagcattgtaaacatcttcttattttaaaaaacactcacagagtcagcaaaaggatacaacaaaatgtataaattgtaccaacccactcatgctaggactttcctataaaagtttctggtcagatagtaaactgttaatatttgaattgaagtttatgttaaaatgctataaaaaataaaatttatgttggtaaaactgaaattaactgccatgaatgtcagtactacttaccatgatgttttacttcattagacaaaaagaccaaaaaaaaaagtctacttctatttacaataaataaaactaatccatattataatccttccacatgaatcattagaacttggggagagaactaaagaggagaaaccatcatgtctattattactgtgactaaatgggattaactaatcctcatgaggtaaagttatgaattaagtggtgctcagaacactaagaaaatttgtggggagagaatgcaaatagctccctaattatctacagcctattaacaagcaaaccttattacttgcaattaaaatcctcttaaattttatggcaaaagttcattgaaacgttgaaaattatatgctaattattatactgtaaagcacatgtttagtgtatacttttactatgggctcaataaataataaaatatcaaattcaaggtgatacagtaactaaatattttactagatggaaaacaccttggtatgaagccagtatgggctcctgttacaatttcacagcactatagcaccagaatatccccaataacaactaagttctatgtgcacggtgacacggctatcctgttaaccactgaatggaaccccaacaccatcacagtacctggcatagataagtacttaagtattaattgaagaaataatgttgacggatgaaaatatatatttggtgataatatcatctactttcaggttctgaatctttaagcgctaccacagagttcattcattcattggtttctgtaccaattcccacacaataaatctataatatttatgaaattatttatgtctaaaagctcccatggcaacctagaccaagtttgtcttgttcctaactgtatcagagcacccagcacaaataaagccatcaataaatatttgtgaaataaatgaatgaataaatacaagaaaaaaaaaggatgttactacagtttgcaactgcctgggacacaatattcttcagtaggcaatgtattatgttctaagaacaataagcccatgctacaaatggtgtgagtcatgaaacagtgcccacagatgggtcttttaactgaggactcccccagctcccacctgattgatgattgattgattgatttagagacagggtttgctctgttgcccaagctagagtgcactggtgccttgatctcctgggctcaagtgattctcccacttcagcctccgaagtagctggaaccacaggtgcatactaccacactcagataatttttgtattttttgtagagatggggttttgccatgttgcccaagctggtcgcaaactcaagcaatccagctgactcggcctcccaaagtgctgagattacaggtgtgagccactacgcggggcaccaatatcattttcacacctatacaagttaggggaaaataccttaatacataaaggaaacaaccaatattcagtttccctcaatgtttctctctctccctctcctcttcccctttcccccacctcttaacagctagtttgttcaaatcaggatccaaggtccataaaatgtgcctgttgaggtatttcataagccttatcatatacattcctcttttatttttatatttttgacatctatttgttgcagaaactaagctgtttctgcatgcatccagcttttttgcattctgaatttttctaattatgctcttgttcttgtaacatgttccccctttccttttgtttcccataaactggttattagatttaaaacagcaatttctattagaaatacaatgcaaatcacatatacattttaaagttttctaacagtcacataaaaaaggaaagaaacagataaaattaattctaataatatatttttaacaatatattcaaaatatcatttcagcacacaatcaatataaaaataaaatatttagattctttcatcatttgaatattaatccaaatccagtgagcattttacaacttatggcacatctcagttgagactaaccacatttgaagtgctcaacagccacatgtggcaaccatactagactgcacagtaatcgagacttgatcaaattgaggttagacacctaacgcctgcttgtttcctttttggtgatgttaatattggtctgtgaatctaggtactgtcagctttgtctattcattaggaaaatccatatcagcttctttcctaatgattttagtagctattaatgattatgcccagatatcaatttttttttgctattctaattctattattccttctgcatttattagctgcaattcttcaattaaaaagaactggccaggcatggtggctcacagctgtaattccagcactttgggaggacaaggcaggaggatcgcttgaggccaggaattcaagaccagcctcggcaacatagcgagaacctgtctctacaaaaaataaactttctctcatcaatgtggttatataagttacagtacatatagaaaaatgagataaacatatgattctcaaaatattaggtttttgacattaaaacctgcctccccagaatactctgaaggtaatccataaagattttgtaatgagtatcattatgaacacatggatttaaacataatttgccatgctttaatctattatactttcattcttttacttttagactgtctcatcttctggatagtaaaagctacttcattttacctcctgcaaccctttttacctcaccccaggaccctctggcctctgacatagcaggttggtccaggctgaccttgcccaatcaagccaattattttcactggcaaatgatatttagagacaacaatctaggtgtgagagggcccgctgctaccagattgtttgtcatttctaggccattccagtaggcaaagcaagaaaaaatactgtttaactttaaaaaatgagttttacagatatttccaacagaaatttaagataaaaggggttttcgcttctcgatttttaatacatgttcccattttctcttgctctgaaaaatcttagtttccaataccattaacataattacttatttgctttacactatagggtcataactgtatttcagcatgtatcaggaattcattccgtattttttcataaatacattgaaagactgtcattttgggaaaattattagaattaagttcagagtaacaatagcaatactactactaagaataatcaataatactccttctctggagagaaagaaggccccactgggaatcttcagattactgagttctaaagttacctgaaataatttgcctctatgtagtatataatagcaaattaatttatttcctttggcttccaattcagccattgatttaaaaatttttaattctattttataattatatattaaaagtaaaatctagaaaacaaggtttattgagaaaagtctgttgtcattgttttttgttgttgagacagagtcttactctgtcacccagaatggagtgcagtggtgcaatcttggctcattgcaacctctgcctcccgggttcaagcaattctcctgcctcaacctcccaagtagctgggattacaagtgcctgccaccatgcctggctaatttttatatttttttagtagagatggggcttcaccacattggccaggcttgtctcgaactcatgacctcacgcgatccacccatcttggcctcccaaagtgctgggattgcaggcacgaggcactgtgcccagtcaagaagtctattttcaattcctatctctctaccttgtctcttctatcgccttaaagtcattttttttattatactttaagttttagggtacatgggcacaacgtgcaggtttgttacatatgtatacatgtgccatgttggtgtgctgcacctattaactcgtcatttaacattaggtatatctcctaatgctatccctaccccctccccctacccaacaacaggccccagtgcgtgatgttccccttcctgtgtccatgtgttctcattgttcgattcccacctatgagtgagaacatgcggtgtttggttttttgtccttgcgatagtttgctgagaatgatggtttccagcttcatccatgtccctacaaaggacattaactcatccttttttatggctgcatagtattccatggtgtaaatgtgccacattttcttaatccagtctatcattgttggacatttgggttggttccaagtctttgctattgtgaatagtgccgcaataaacatacgtgtgcatgtgtctttatagcagcatgatttataatcctttgggtatatacccaatactgggatggctgagtcaaatggtatttctagtcctagatccctgaggaattgccacactgacttccacaatggttgagtcagttaaactagtaaagtcatttttattagttttaggttaaactttccattttaaaaatataagcaaatataattacatttgcccctccccattccttaaaggattatatattattacatatatccttttctaccttgttttgttcatttatcctggtgatcacttccaaagcagtgtatattcttcattgtgtaaatgtaaaacagattattcagcttccaacactggatggacatttttatcctttttagacttttgctattatagatagtgctgtgataaatagccttatcatttttgccaccaaatctttaagacagattcctagaactggggttgctgggtgaaggaataaataagtgcatatgtaattttggtagatactgctaaattgctttcactacaagcttgtgttttctccagcaatgtacacctttttagcaagagcaatccactcaatgggcattgactgaaaaactgacacttggcaaaccaaaagtttgctgtcaagatatacaaatggccagtgctgtttctgtcttttcacaccactgacaagagcaatgcttatcaatttatttcactcaggacagaaacaaatagcaatggaaatgaaaaataattatcatttaggattgtctaatgataaagttttcatatgattttaaaataccaaattctatttaataaaaatcatggtgacatggaacctcaagggtcttccaaatagctactttccaaaggttctatattactgtattgtgttggggggtatttatcgccaactgcccctcctaaaacatctttttgtattctctcccatcgcaaacctagtctaacttgtaggatcttcacatttgtggggaggaggttagagggtagggtagaagatgtgtgatcagattctgggttttggaagggttttttgcttctatttgttcacttctctattttcaaaacgtctgccatttgcactccataccactcatcctaattgtagctgccattgctgctaaaatccactacacttccaacttctatgtttgcttgtttttggtgttgctttcattttgttaggcttctcagcccccaagtgaaaggtctaattttcatatcaagagcatcagccaaacctttgattttaatccagtagcaaaatgatgaactgaatgtaatacccttctcaggaatgctcatttctggctgggtactcaggagttgcttttatattgttagagaaggcttattttgtttgtgttgttgtgggttttgttttctttcttttctttttctaaatccagaggttagataaaaccagtcttcaaagtttactactttgccatactaacacagttggcgtaaactgtctgatctctgcctgcacaacaaagctaccttttatcagactgtgaaaccacctttcatggctgccacagaactactcagaacaacacagtctacaaaaatattcctaagacatttactatgataaaattcccttgattgcagaagtagtcattcagacaactgtaagtattactaaataaatgtttattgggcactataatattatactaaaatgtaagacccatgaaggcaggaaattttgtctgttttattcactactagatattcagtgcttagaacaatgttgcaaacagtgaaactcaatacctattacaaatatttattgaatgaataaataaatgagcattattcataaggcaccatgaaagtattatgagtagaaacagtatctgccttaagaagctgctaatttgattagactaggttaaacatataaaaaggcaaatatgtaacatatataagccaaatgaatggagttgacatcaatgttgtaagagcccatagaatgggaatatcatcacccagtggaggaatctctactcacatttggcttgtcataaaaagtagtactcagcttagcacagaagggggaagtacaagtgtatgaactaatgtgagcaaatatacaaaatcaggaaatgatgaacagcaatccataagacagacttcccttacgaaggagacatgtttttgtttttctagttttgtttttaaagcaaagaacattttacgcttaaagtgtattttttaaaaaaacaaaatataatttttctttataattaataattatgctaaaatgcttctatatcatataagcaaacaaaagatgtttttagtaataacctctaggggttaccattttaatatcaacatgacttgtttcttacatgtgtaagcatttaacattgtgttcacaggtaaagaacaatatttattccatttattctgaagatttacacctcaaattatagggaaaaatgattaatttccatagaaacatgggttaaaaaacaaattttttatcctttcaaaatttctgagatgtggaagcatttaccattgtatttatatataaagttttaaaaaaatacaagaattcatagtacagtttccccaaaactaagattattaatattttaaaagggggttttaagattcttaaagatataatagagtagaacaaagtactttaatgtttcgtttcccaaaaatattaaaaaactgagattttttaacttaatagtaataacacatgtatgtttactatgtgcctgacactactcttaagtgtttaacatacatttttaacagtattaataatataagatttaacagtttgctttttttaagttattttcttaataattttaaggtgcttagttcttacatttaatgttttatgtgccattattttgcttttactgcaaaagaaagatctggctcccaaagataaaggagatttttggtaaatggtgaaggtaaagaaataaatgacccacttgcctagtgtgtaattacactgcctgagattgtaacaatctatcacatgaaggaggatgacaccacgctaaggggtgagtcaaaggagatagcctttgactaactacgggaccctgacgatcgatactccacagatattgtgctctcaaaaacaattgaattctaaaaaagtttgaaaatagattcccccccttcttttgatactgatcagagacctatcttgaccttattctggaagagtaatactttcttaaaaaggtatatgaaatacataaatcgtttctatctctggactgttctttcaaatggatatttaacacattcctattaaaataacagtctgcaagccaaaaaaaaaaaaaactgctgaaatctttccttattagataaatatgccttcctgattggctgttatcaagttatcataatacttagcacatgacaggtaagtactccaaaggctcaaaacttgaaaaacctatcagaaaataaaagtctccctctccctctccctctccctctccctctccctctccctctccctctccctctccctctccctctccctctccctctccctctccctctccctctccctctccctctccctctccctctgcctctccctctccctctccctctccctctccctctccctctccctctccctctccctctccctctccctctccctctccctctccctctccctctccctctccctctccctctccctctccctctccctctccctctccctctccccacggtctccctctcatgcggagccaaagctggactgtaccgctgccatctcggctcactgcatcctccctgcctgattctcctgcctcagtctgccgagcgccgccacgcctgactggttttggtggagacagggtttcgctgtgttggccgggccggtctccagcccctaaccgcgagtgatccgccaacctcggcctcccgaggtgccgggattgcagacggagtctcgttcactcagtgctcaatggtgcccaggctggagtgcagtggcgtgatctcggctcactacaacccacacctcccagccgcctgccttggcctcccaaagtgccgagattgcagcctctgcccggccgccaccccgtctgggaagggaggagtgtctctgcctggccgcccatcgtctgggatgtgaggagcccctctgcctggctgcccagtctggaaagtgaggagcgtctccgcccggccgccatcccatctaggaagtgaggagcacctcttcccagccgccatcacatctaggaagtgaggagcgtctctgcccggccgcccatcgtctgagatgtggggagcgcctctgccccgccgccccatctgggatgtgaggagcgcctctgcccggccgagaccccgtctgggaggtgaggagcgtctctgcccggccgccccgtctgagaagtgaggagaccctctgcctggcaaccaccccgtctgagaagtgaggagcccctccgcccggcagctgccccgtctgagaagtgaggagcctctccgcccggcagccaccccatctgggaagtgaggagcatctccgcccagcagccaccccgtccgggagggaggtgggggggggtcagcccaccccggccagccgccccatccgggagggaggtggggggtcagcccccccgcccggccagccgtgccatccgggagggaggtgggggggtcagcccccacgcccggccagccgccccgtccgggaggtgaggggcgcctctgcccggccgcccctactgggaagtgaggagcccctcagcccggccagccaccccgtccgggagggaggtgggggggtcagcccccccacccggccagccgccccgtccgggagggaggtgggggggtcagccccccgcccggccagccgccccgtccgggagggaggtgggggggtcagccccccgcccggccagccgccccgtttgggaggtgaagggcgcctctgcccggccgcccctactgggaagtgaggagcccctctgccaggccagccgccccgtccgggagggaggtgggggggtcagccccccgcccggccagccgccctgtccgggagggaggtgggggggtcagccctccgcccggccagccgccccatctgggaggtgaggggcgcctctgcccggccgcccctactgggaagtgaggagcccctctgcccggccagccgccccgtccgggagggaggtgggggtgtcagccccacgcccgccagccgcctcgtccgggagggaggtggggggtcagccccccgcccggccagccgccccgtccgggagggaggtggggggggtcagcccccctgcccggccagtggccccgtccgggaggtgaggggcgcctctgcccggctgcccctactgggaagtgaggagcccctctgcccggccagccgccccgtccgggagggaggtggggggggtcagccccccccgcccggccagccgccctgtccgggaggtgaggggcgcctctgcccagccaccacccggtctgggaggtgtgcccaacagctcattgagaacgggccaggatgacaatggcggccttgtggaatagaaaggcgggaaaggcggggaaaagattgagaaatcggatggttgccgtgtctgtgtagaaagaagtagacatgggagacttttcattttgttctgcactaagaaaaattcctctgtcttgggatcctgttgatctgtgaccttacccccaaccctgtgctctctgaaacatgtgctgtgtccactcagggttaaatggattaagggcggtgcaagatgtgctttgttaaacagatgcttgaaggcagcatgctcgttaagagtcatcaccaatccctaatctcaagtaatcagggacacaaacactgcggaaggccgcagggtcctctgcctaggaaaaccagagacctttgttcacttgtttatctgctgaccttccctccactattgtcccatgaccctgccaaatccccctctgtgagaaacacccaagaattatcaataaaaaaataaattaaaaaaaaaaaaaaaaaaaaaagtttccaaatgagggttacagtgtataccctgaacctgatacagtacttaataaatagcatgatttgactatgtaaaaagcaaacagaggccaggcatggtggctcacacctgtaatcccagcaatttgggaggctgaggcgggtcaatcacctgaggtcaggagttcatgaccagcccgggcaacatggtaagaccccatctctacaaaattggcctggtgtggcggcaggcacctataatcccagctattcaggaggctgaggcggaagaattgcttgaagctgggaaagccaggaggcggaggttgctgtgagccgagatcgtgccactgccctccagcctgggcaacacagcgagactctgtctcaaaaaaaaaaaaaaaaaagaagaaagaaagaaagaacttttacaaataaaaaaaacttttatgtccattaaatattttacaaaataattctacaggataaataatcacattagaattgtcttaaaacagtgcatcatgttttattttatttttatttttgagactgagtctcactctatcgcccaggctggagtgcagtggcacaatctcagctcattgcaacctctgccttgagggttcatgtgattctcatgactcagcttcctgtgtagctgggattacaggagcccaccatcacacctagttaatttatttttttatttttttatttttagtagagatagggtttcaccacgttggccaggctggtctcgaactgacctcaagtgatccacgagcatcggcctcccaaactgctgggattacaggcatgaggcaccacgcccagcctcatgttttatttttaaatacttgaactgtatctccacatgattcctattaccatagttataattaaattcattaagctatatcaaaaatttttcaaattatattttacataatttctgggatgtttgtatacagcattttaagtatctgtaactacaagagcaagtgtctaaaatacactttaaagtctgaaagagattaagtggaaagtaaaatctcatctaaatcccaataattattttcttttcacagaggctaatattaacaaatataatgtaatccatgaaaaatcatgattattataatatgaaagattataaaattaaactttttagaaagttcagaattttgtattgatactatagcatttgctattcgcagaggatgacaggtatttcgcaaaaatgtcagtacgagaaggatattacatgaaactgcaagatgtcacctctattctagagggttgtagcaacccactccctcccaaagcacacccttgttaggataaaagaagaattaccagataaataggctgtgcctcaaaccaattaaatccctgggggtgcaatccaggcaacggaaattttttaaaagcttcctacattccaatatgtagacaaggttaagaactactgctgtatggtatagatctgtttgcaaaggtgaagaagtttgaaagaagtaggcaaaaagagtgaaagtgtaagataagaacactattggataacaaagatgagtatatttcactccaaaatctacaaaggatttgtgaggccagtacctcaggcctgtaatcccagcatttaggaggctgaggcaagaggcctgcttcaggcctggagtttgagaccagtctgggcaacacagcgagattctgtctctacaaaaaaattaaaaaattagccatgggtggtagcagtcttagtactcaggaggctgaggcaagagaatcatttgaccccaggaggtcaagactgctgtgagccaagattgtggcactgcactccaacctgggtgagagagtgagaccctatctcttaaaacaaaacaaaacaaacaaacaaaaaaaaacagataaaatctacagaagataaaaggggttagatcagtagaaagccctcacaaactttacaaactagcaatttaattacattaacaaattattctgttaaaatacaaatacaacttgaggaaatttattgaattgctcacattcagaccttgatataaaatttatttaacaaaatgtaacctagctaaaataagtcacggttaatgagaattctgattgtctatagggaactaccgtttcagagaataaagggatctagggtgtagatcttgaatttccagaaaaaactttgaagtcactgtatatatatgaaggcaaaggagtctacagaagaccaggctcaagtaagatggcaaaaattatatcaagtaagatgtcaaattgatgacagaaggtgcacaaaagagtatcatttccattactgtctaccaaaatttggtaggatgtcatatgatataaaaataccagacttattttgaatataaaaaatttcataaactcagtttattcctgtgttttcaattgaacttaggacagttctactcaccccacttatgctgaaaaaaaaaaaagaagagaaaaaataaaagtacaaaagacatccatggaatctcatatcaatgttccttcttttattcagtatcaaatatttaagaccctggtagtatatatcaggtattggaccagggatgaaaacatcaaaattaatgttacgggcttctactctacaagtactttatagtatactgggaaaaaataaaatgtgtaccagactataagtgctttaatacttgtatttatcaaacgctatgagaacacatataagcaaagaaatatctaccaagtaatgcttctgagagaaagaagaggcaatggctgataaagtacttggacacagtcacatttcggaaggattctgaaagacaaatgggaactcaccaagaagataacatgggaacagaactgaaaacacaaagaagagcatgagaaaatataaagaaaaaataaaaggtatgtctggatcgcaagttgcttggtgtggttagagatgcacgaaaaagatgaatggcaaggaagatttaaggaatggcactaacaagccttgaatgtcatgtcttaggtttttcaatgaagtggttttaataatggtactaggaaggctgcaatagcattgaaagagagtaaagacaaggaaacccactggtagactacttgcagacttctataaccaagggtttttcaatgaatctaggttgtaatcataaccgattgttataatggggtatagatatagatcatataaacaatggaaagctgttctgatctcagaatagacccttgagttttctcttttcaatgaatacctaattatggcttgacatattatcgaaaacagaccaggaaatgtataatggcattacctaatacaagtgtatcataaagcataatagcctgtcactgacatttcacttctttatttctccatttatatatcctctaatcacatgcagtgtggatttcatgccaccggttcacaggatgtgttccctcaaagtatatataatccaaaaactcctaaatccttagcccctaagcttttccctaacatttcacatatgacacaggaattaacattgccatttaagattgagtaaactgaggtttagtgcacattatataattccaaggccaaaaaactactaattaaaagtgcttattttcaaaaacccagaactgtatgaggccaaaaccgatgatcattcttctatgccaaacttacctcatgagataattttcttctactcatgaatagattacaaccttaagaagcctagcaacttcaagttcattttcttttataaaataaaacattacataagttgagaactttttgagacataactcacatataattttatgagttttgacaaacacatacaattatgtcaggacccctaagataccatcagattcaattattcacaaggaatcacaggattgagtcatcttcatggctatgacttcctgaatcttgtcttagtacaaacaaaatcaacaaagggagtgccatggtacaagatctagagaaaccaggtacaagcttccaagagtcctttccttacgcaatcacacaggatgtgtctaattcctccaggaatttcacacatatcacaatgtgtgaaatgtttgtcaaaggaaccttatttagagactcagctcccaaggttttcatttgggactggttgcttagggaccctctgtctagtacatgctgtaattctagactcccagaaagaaaactgatgtttacaatcaactacatcgtttggacaaacagtctaagcacagtgagccactcatcatttatgtaaagttctatatcagtgtagggacctgtttactattcaaattcccagatgccagccaagggtccaccttgtaactgaccctttgtaaaggatgagacgctacgttaacacttttctgcaaagttatataatcaccaacacaatcacgatacagaacagctccatcatgccaagaaaaaaaaaatctttgcacccctttttaatcaacctctacaaccactggtctaatttctattcttataatgtgcctattccagaatgtcatacaaatggaatcaatcacatttgcacatagccttttgagtctggcttctttcacttattgtaatgcacttcagattcatccatgttgttatatgcaccagtaatttgttcctttttattgctaaataatagtctactatggatataccacagatattttcatctgccacaattcaatatggttttctccggtaaactgtatttctacttcacttgagtaaacatctaagaactatatgaggccaaaacctacgatcattcttctatgccaaacttccctcatcaaaacacgcagtagaatggaggaacctcaaattactatgctgagtgaaagaagacaaaaaagaagtacaaattgcataaaaccatttatataaaattctagataatgtaagcttatctagagtgacagaagatcaatgactgcctaggggcagggagggtgggagagagtaatcacgaaagggtaggaaaaaatctctagattatgatgatggtttcatggatagacataagcagagtcaacactcggtatcctcaggttctgcatctgcagattcaatcaaccacagactgaaaatattcatataagaaaacaataaaaaatagcaataaaataaaaaataggtcgggtgccatggctcacacctgtaatctcagcactttgggaggctgaggcaggcggttcacttgaggtcagggattctagaccagcagtctctactaaaaatacaaaaatcagtcaggcatggtggtgtgtgcctgtaatcccagctactcaggaggctgaagcaggagatttgcttgaacctgggaggtggaggttgcagtgagttgagattgtgccactgtgtactccagcctgggcaacagagtgagacaccatctccaaaaaagaaaaaaaaatgcaaaatttaaaatatagtaaaacaaccatttacatagcatgaacattgtattcagtattatatgtaatctagagatgatacagcagaaggatatatgtaagctatatgcaaatactataccattttatacaaggaacttgagcatctgtggattttggtattcatgcgggccctgcaaccaattctctgtggatactaagggattacatgtcaaactgtacattttaaatatgtacagtttattgtatgtcaattgtaccacaaaaaataaacaaagccttagtcacatccattaagttttcattctatttttttatattattgatgtcattttttctgtacccaggactatgtaatacatttcctatttcacatttgatattaaaccatgtgaagaatcatccttatttaactaatgaaaggaaaatatttaaggaagctgaaacccagagagactaagtggtactgaaaacacccaaaaaccaagtgctctgccagtgtcacgtatctgttaagtaaagagattcaaacccatgtctgctttacttaaaagctaacggtcttaatcactataccatacaatattaatatatcatcttaaaggaaggattcagaggatagacactgtgctaggctgaataacagcctcccaaatatgtctaaatactaatccccacaacctgtatgttactttacagggactttgtggatgtgattacattaaggatatagatatgagggcattatccaggattaacttcgttgggcatgtaatcataagcatccttataagagggaggaaggaaggttagagtgagagaaggcattgtgatgatggaagcagaggaaaaggagactgacaacagagaagcagagtcagagagaaatttggagatgctatgctgctagttttgaagatggaggaagaagccatgaaccaaggaatgaaggcagcctgtagaagatagaaaagtcaaggaattttcccccaaaaacctgcaattgattgaatgtttgtgttctctataaattcatatgttgaaattttaacccccaatgtgacaatattaggaggtagggtcccttagtcagtaattagattgtgagggtaggaccctcaggaatagaattagtgcccttagaaaagaggccccagagaactctctagctctccttccaccatgttaggatacaatgagaagtcagtagtcttcaacctgggagagggctctcaccagaatccaaccatgctgactggcaccagatcacagacttccagcctccagaagtctgacaaataaatgtttgtactttaagccactcagtgtacggcaatttattataacaacctgaatagactaagacaagcctccagaggaaacacagccctgccaacccatttcagacttctgaacttccagaacaactgtgttattcaagccagtaaatttgtggtaatttattacacagcaataagaaactaatacaggctctatagtcaatgtagtttctttcttccctatcataaatgttctatgcatttggcctacagtaaaagttcctgataatgatggaggtaaaaatggcctctggaagtttgggtatgggagaaaatataaaaggcagtacactaagcaattattcttgtggactctagatatctatgagtcttagtaaagtccaaaacccagtatgtgccaatagctttaggtcttcctttgcaaattttaaaaactcaaatgatgccaaagtaaactattccctaggctgacttaagacaatacaaattcattagtgggtctggagggaaagagtggtatcagagatctcacagtcagtctgagaatgatgtggtgttaccaaatcatactaaacacagactaggaccaaacaagctataggcagtgtgtaaaaagcaattcactctagactttattttattttgtttttaattatccatgtggcctaaatcccacaaaagagaatgttaaaacaaatttcaaacctgagacttgatttttcagttcatttctatcatctatagttaccatctttaaagcttggaacctgtaattctttcattcattcaacaagcatttattgtgtacaattcacagcacatcataatgaacaaaaataaatatcaccctttccctaatggcatttataagttagaagggaaagattatttcaaaaacaattaataaacagcttaacaagtaccataacatgggaagtagaagttgatgtgaggggcatggcgggaaacctaagttagtgagggaaatagaatatgaaaatgcttggagactagagatggaaaagagcataaagaaagagtgtgagagtatgtaagtggctgtgtattagaggggaagtgtcaaagggagggataaggagagataaggcctgataggtgagtaaaagccagccatgaagagactgcgccctggtcttaaatcccagtggtacatatagagatagcaaaaccagtcattgtgatgattctcaatcctggctgcaaatctaaggtcgtccagtagagtgcttctcttctactgtggcctggcaaacacagtttataaaatctgtgaaaagtgagagtaactgaaaactctaagaactgagactaatagtttcatgcatatgcaataataatagctattaatttttaaaatttgacaattttataagttacaaatattagagttcctgtatacccttcactcagcttcctctaatgttataatcttatataaccacactacaattatctaaatgaaaaagtttacagtgatacaatactattaactaatcttcagagtacatttgatttttgcaaattttcccattaattttcttttcttgaccaataactaatacagaatcccaaactgcagttagttatcatgtcttcttagtctcttcaaatctggaacaattcctccatttctccttgtttttcatgaactttatatttttggagactactgaccatttgttttgtgaaacatccctgagatttgagcttgtctaatattttctctttttttttttccctctggctctgtcacccaggctggagtgcaatgacacgatttcagctcactgcaatctccacctcctgggttcaagcgattctcctgcctcagcctcccgagtagctgagattacagtcatgcaccaccacgcccagataattgttgtatttttagtagatacagggtttcaccaagttggccaagctggtatcgaactcctgacctcaggtgatccactcacctcagcctcccgaagtgctaggattataagcataagcaactgtgtccggccaatattttcacttaattaaatggaagatttgtatttttggcaagaagaccatggaagtgctcttgtgcacttctcagtgcatcacatcaggtggtatatgatgtcaagaagtcttcttactgatggtattaagttgatcatttggtgaatatgatgtctgccacgtttctacatattaactatgaagttaatatgtttcctgcttgtaattaataactatcttgttgggagatactttgaaacaatggaattatcttttttctcattattccatcgccttaagtttcagtattcactgattattgcctaaactgtattgtattgtacagtactgtggtgtctgccaaaagatgatttttctacatctattaatctttttacttttaaaaattgacattctactgtaaagaagagctgtctcttacctcccatttataaattattgacttcacgataaactaaaaaatatttattctatgggtttttaatctattactgtcaatattataatgttgctcaaattgtcacagatttagctatttaaagatctttgggatttatgtccttttgacatgctgctacccatttttgagtacttccttaccttctggcaccacaagataatcttatagttgccctttcctagctctgaaatcagccatttatccaaaaagatctagttttttaagttaacaaatggcatacagaaactaagatttgggaactaggtttgcattttatcattggttgtcactgcttctatgtcttctcaggagacagggctaggtgatataagtatgtatgctaattgtgcatactaacacatgtatatgtaattgtttatatcatctttctatgtgtgtacacataacaataaattcacattgatatttcattccaatcaatcaccacaggattcattctagagtttcctctccttatttgtaactcctttctccaaaagaaagaaatcttgcttttactatccaaaatatatttacttatttgctctaatcctaggatacatataaaggaattttagattcattatctttctcccccacaattattggagcaattatgctgttcatttgtaatgctgttagattttcactttgtcccacaacatagctgatgtgtgtgtgtgtgtgtgtgtgtgtgtgtgtgtgtgtgtgtgagagagagagagagagagagacagagagagagattaggttctaagagtccaaagcatacaaaaggtatagtcagagaactgtcactcccctttcattgcttgtactctgttcccattccccagtcctttccagcacattctcacctacctgctgcagataatcaatattattagtctatgattcaacccttcctgtatctctttttgtacaaatcaacagctaacagttattaagcatttacatggtatatgtcagacactgttctatatgcctttctacatattagctccttcacctttcacaagcacctaagcttcaagagtgtagatgctctgaaacatcgttttcatctaggaatcttttccttttcgtaggtgttcttgattgcctcagatatacccaagagatattcattatagaattagagaactaaatagtacattgccaagtactagattttgttctgatgataatgatttaacatgtgataacaatttttatttcctcaggtagttaattcattacaaatcagtcactaagtacccataaaagtacatacaatttctcatttgtcacatttattctcacaatagcacaaggagacctgcatgtaggacaaatagcatccttactttacatgagaaaactgaagaacctataaacataaaaaggacttctgtgctcccactaaaaccctggtaagtaagttcatagaaggcttgagtcttcaggaagaagagagagacagagacaagggcagccagcaagaaagggaggagagtgaatcaacacagggaaagcaaggtctgaaatgaatgcctgagtacagacaactgacaatagacaactattgcaaattgttgattagcaaggcaatatgaaggaactgtttaaggaaattagcagtgtgtaaaatgcagcagaggatagagacaacaaggtgtaacatttctgggaaatctgaatgtataatataaagcattaaagtacctttctaacatcaatttctaggaatgctcattttgttagtcaaaagcaattacaggaaaatccaatctttgactatttaaacacagtgatttttaccattgaccatattaggataaaatggggagcttcttaaaaatactaactaccaagccattttccagaccaattaaatcagaatcctgggaaaggtgtacaggcgtcagtactttttttaataatcccatggtgattctaatagacagctatagttcagaaccaacacatcagtagtaaacattgacaagaagatgcccatatgtaataaagtttcgattttttcttttttttttttagaagatactctctgttgacagtgaacattctgcttttgcagaagtatatacttactaaggtaccataaacttcagaaatgtaaaagtaaaactaagaaaatgtacatctacaatttcctaatgcatttttataaataattgtagaaaagcaatttttcatatatcaatcctttagtattctaaagttattataatttattttttttaattttttgataataaatactccgtattaaaaataccctctctggaaattttccaaattatcatctggatcagagatataagtaacaacattctaaacacacaatgctataggactggtttagcatgataccaggggaagcagaaaataaaaggaaatctaaactacactcaaagcaacaatctgttaaattctaagctacgtgaggacagtatccaagtctgtctattctactgttatatactcagtaatttgcataaagcctggcacataataggtgtccagtaattcttagttccataacaaatctattttgaaaacttatttagaaatgcatcaacggaaggaagaatgaaaggaaagtagtaaggagaagggaaggaaaagacccttggaatgacgaacaaatgactgactgatttagtcagtcattctcaaaatggtgaagtgggagtcaggagagtaggattctgagtcttggctttgccagaaaaccagttgtatactcttaagcaaatcatttaagttctccacaataacttgctcatccataaaacaaggagaggcataaatgacttctctcatgacctacagtgttgaaaatctctatatatcactgtatcagatattttgaaggaaagtatacattaatctaagtattattttttaagacagaaaaaaattgacaagaatttactaaaccgaaaattttaagtaaaagaatttctaattcggcatatacaaccaaaatttctaattacatatttggtgaaaaaagataagtcattgtatatccagctatttcatatttaactccaagttttaattctcagttatccacagatagaggaataaaacataaggaaaactcataacaggaattctctcagtattttctcagatgtatttttcccagcaaaagttaaaaactaaaggaaaagttgcaagaacacttaaaaaaataaatcctacatctaaatttcccaccttgcttacatttcagtacatttgctttatcatgctacctcttagtctctcttggcatatgtgtgatagacattattttttttctgaatcaaatgagagttagttacaaatatcatgacacttcaacctttatctatatttattgactaagaacaaagatgttttcttatataatcacaacacaattattacacttcataaacttagtattaacaattcatgtggttggtttttaatccgggtccaatcatgtatcactttcatactaatatttgaataatattgtgttatttactaaaaattaattatacttttaaacaagataattcaatacaagacaatgagagttatagggaggctggacaatgccagaaagagtcatatattatgatttaagaggttaggttccacttcccttttattataacaagctgccattggaacctatctccttaatgggctggggagtgattttcatattgtgagatgccttgagcagcagtgagtaagaaacccatgagctttcgatgtcagctaggatggttcctttttatccattttatatattggggttctaactaagaacagtatttacaaaaaaaagtaatttttgtggtgttttggttttggggttttttttttgcataaaaatgaatttgaaaacaggctaaagaagtaaaggtaaaaatcattaggtaaaagagtagggaaaggaaagagaaatcaaattctcaacagaataagaatgatcctgacccaagtatttcagaatacaaaaagtcaaacagtcacagccttttattgttcaccacagttgaagtagcaaacagtaaagtctaaaaaaaaaaaagctttattacttgaaaaaccaagaatgcttctgaaccttcatttattccactgcaaaacagaaataataatatacacttcacagggttgttgtgaggatttaatgaaataatgtttgtaaagggctcagtaaatccctggcaaattgtaaacactcaaaaataaaaattaaaaaacatcctaatactgttgggtgaagtggctcatgcctgtaattcccagcactttggcaggctgaggcaggaggatcacttgaggccagcagtttaagaccagcctgggcaacacagtaagaccccatctcgacaaaaaaacttaattagtcgggcatggtgtcatgtgcctgtggtcccagctacttgggaggctgaaggaggagggctgcttgagccctggaggtcagggcttcagtgagccatgtttatgccactgcactccatcctgggcaaaagagcaagacccagtctcaaaacgaaaaaaccacaagaacaaaaaccaaactaataccaactactaatattaagaagttgactgggtgtaatggctcacgcctataatcctagcactttggaagccaaggtaggtagattgcttgagcccaggggttcaagaccagcctgggcaacatagtgagactttgttgcccagaaagaaaaaaaaaatagccagatgtggcatgagcctcagggaggctgagttaaaaggactgcttcagcccaggaggttgatgctacagtgagctgtgatctgcactccagtctgggtggcagagcaagaccctagctcaaaacaaaaaaacaaaaaaacaaaacagaagttgcatgatagttatgagtacaggctctagagtcagaatgcctgggttcaaatgttaactactcaatatactagcctttggatcttggtcaagtaacaaacttttaaagctctagtttcttcatttgtaaacttgggacaattaatactacctatctcattgctctgtttttaagatacgatgagataatccttataaaaatacttggcacagggctgggcgcggtggctcatgcctgtaatctcagcactttgagaggccgagacaggtggatcatgaggtcaggagttcgagaccagcctggcgaacatggtgaaaccccgtctctactacaaatacaaaaaatcagccaggtgtggtggcacgtgcctgtagtcccagctactcatgaggctgaggcaggagaactgcctgaacccgggaagtggagcttgcagtgagctgagatcccaccactgcactccaacctgggcgacaaagcgaggctccgtctcaaaaaataaataaattaattaaataattaattaaataaaaatacttggcacagtgtctggctcaaaattaattgctcagtaagtatcacctattattcacatcactattattataattatttaaaatactagcatatctagcctagatattaacatataaagctctaaattttattttctaattcttgaataaacttttagaatcacacaatcttagaggtgaagaggaccttactatccaatgaacttattttaatagtaagattgcccatatatttgcagtaagttatttgtgttaacatctcccctctttaaacctcaagctctatgcaaacagactattactttcttctcacttgcaatttgtctataatgaatgtatatgaaaattatgatcttatttttttttagcttattcattgtcacataaccagttaatgacaacggctgagaatacaaaggcatcaaactgcacagtgctctttccataaaatcacactaatcttgtattagagaaagacaacattttaaaaaagcccttttataacctccaaatatatccttgtttatgaccatttacagtgaaaaattataatcattgctttttaagctatttatttatagtttttcacttttctatttcccctattagagaaaaagttacatgaaggcaagcgatatatttgtcttattcatattgatttctacagtgccaaaatgtgcatagtaagtggtatacagccagtactaaataaatacgaaaagaagaattgttccaataggcaggagaaacaaaatttgaaacgtcaaatatcagctattataacagcctacagggtcctgaagtagaagcagccctgtcaacaaacttcaaggctgggctaaattattgctgtggttctcaagtgattctcatattgggattttttttttaagactgtttggtttcactctagacccatataaaaccataatattttctcaaattccttaaataattttatttgctcccaaccctttggaatacttctgaaaatttctggttatagcaaaaattactacagagacttaaaagttcaagcacccccaaactacaacttctagttatctgctgaatctcaaaattttctcatctactcagaacttaattgtcaaagaaaagtgttctttacaaacagaaaccaaaattcccaagtctgtattatctatagtacatctcttttcagacatactctacttctattacactcctcttaatctctgaatcaatcttatccttcatagtttacaactagttatgataaaatattttgaattttatttttcaaaatttattactgctttggttgaaacaaatatttctcagttcatacagcataatgaaaattttaagactaatagtttacctgaccccccaacccccaaaaatgatttctttatgacatactgtaggttcagtactatgctaagaactacagaaataacataaggctaaaatcttataatctacacacaaaacaaagaaatagaacttactgtcaagtactaaattctgcaatataaattgattataaatgccacagaagataggaggaaagaatatcaagaaaaactggagacttgaagaaaaactgcataatgagacttgcaggatattccaaaaatgctacaaattttttaatgtttcaatgagcatatgtgcaacaacttgaatttatttttcaatttgtttttatttacttttgtaatatattgactaatgctgacacttggatgccataagtttattttattccttatgtctttgaaattatacaaaaatattttactcagaattataaaaagcacatattcaattttgaatatggcaaaacatgttacttgccaatgaaattatgtggttttttgctttatattcattctttgaaaatgtagttaacctggcatggtggttcccatttgtagtcctagctactcaggagaggctgaagtgggaggattacttgagcccaggagttcaaagttgcagtaagctataatcacgccactgcatccagcctaggtaacacgacaagatcccatgtcttaaaaaaaaaaagaaaaagaaaaagaaaaaagaaaagagaaaagtgtatagttctctgattcccatatgttcagtatcaggcctgtaattagtacatcacaaatatacaaaagataatattcatacatttttctagccattaaaagtagaaataggccaggcatggcggctcacacccataatcctagcactttgggaggccgaggtgggcagataatttgaggtcaggagttcgagaccagcctggccaacatggtgaagccccatctctactaaaaatacaaaaaaatcagcttagcatggggcacacacctgtaatcccagctacttcaaaggctgagacaggataactgcttgaacccaggatggggaggttgcagtgagctgagatcctgccactgcactccggcctgggtgacagagtgagactctgtctccaagaaaaaaaaaaaaaaagaaagaaaagtacaaataaggtttgactaataataaaaattcaaatctagtgccataagtatgtataattatatgacacaactatactgtgaccatataatacatactacacaagaaaaaaatggctcctcagtatcagtactgcaatatgcctctgtggtagagacagatcccagaaatatcaacttactagaaaaatgagcatataggtgagtctcattatgtatctggccacaggcatttaaagtacatagtgtttaaaactaaacactaagtcatgcaaagactttcaaaaatatacctgttttctttaactaacatctccattgattcttccatttgttttgttagctattgattttttccctctccttcttatgaaaggggaacaaggaggggatacatggggaaaatgttacctttattaagccatcttacaatgttattgtcaggaatggctataaagaatttctagcatcgtcaaagtcccagagagagcaatgagtggtgcctgcactgatgtcaagtactagctcctaggcatggcttaggaataaaaataaacgcattagaaagaataagaatgggtgtatattgcacttatgagtacccatttgcttgattatccacatagcgtaacggaatcaaatgcctaagatgaactcttagtaagtaaggtatattagcattttagtatactaatttcactacaaattcattgatattacttatttagtaaaaaaaaaattagaggtaaaggatttttttaaagataggacatgatatacttcttttggaaaagaaaatacgtcaagatgagttcaatattgaatttcaccaatgagtatatattaaaacatcagaaattattttcaaaacaatctttccttaggcttaaaaggagaacctgatttaaaatcaacaccaccctagccatagcttttaacgggtcaagtacattagctactcctttctgcaaacaatggtacataaaaacaaagtgggatatttcctacaaagaagattaaaaattctttaggcctgcctttccttggactctggattttaaaatgacatactacaagataaaatagtaatgctaatattgatagtttgtccattacaggtcagctaactgtccactggaacagttacaaagctgttagtttcgatttcacaaggccaatcaatacagaggcatactgtttcaattttgtctgcattgatttttttttataacactccaaccttacagcattcatctttctgaaagaaggaagatttgatttactgaagaaaaattggagagagcatcacaaagattttaccggcaagcctgtgacacagaaaaaagatgaatgtctttcaggaagagacgcctctagcttgagggcatccattagaacacactcaagcaatctgaaaaggagtttcttaaagcagcagaaatctaaacctaaacagtctcctaaactaatcaaaagcattcaagaattttgatatgaggttccgttaaaaattcctaaaccttattacttctaaaataatttatgtctctagctctacctatgcattttttagagatgagaaccacctctttcccagactaataccaagagtgaatttccatggtacattagtcagcctattagaatgcaatgaaggacgatatgagaaaagggtagtatgtcctctgagacttccatccagtattctccatcatctctcctcatccttcttacattcagccactttaccaggtgtcatctacatgaaagatgatttgtctcctgacccaaataaacacaatgcctgctccatgcaccggaaaaaaattacttctgccactctgttcatttgtggcttctttcttgcttattccactattcttatcaagctctctcagttttcacctgagcctcactccaggtgacagtaatgtatggatgaacaggtacttgtctgtcccattatttcctgaaatctctaagcatttgaaaaaatgcaatgacagtaaagggcacagttatcagagctccaagggaggaatactttcctttacttaccaatgcaatagtctaggcatcaaagaaaaaagagagagagagaaagaactctcatggcaaaagctggtgtaagcgagatattaagacacaaattgcattcaggcaggtcactaggtgtcaaaagatattagatgcctgctgtgaggaaacaacaattcccatctgcctctgagaaaataatattttcattttcagtttttattgaatggaaacttttgggaatatgtctttataaagggtattaagtctaccaactataacatgttcaaaatggctataatcatcattgtgttatccataaagcagcagatttcatttggtctctttagatgggataaattggattcttttttccccggcttgcagttttgtcgcaggaccagatgtttctcaaatgccacatgctgaggctcctatactgaatgtagcacctgaccttctctataattgactaaaaatattgatgtaatggcatgggtctgattgtgatttattaaaaccactgccgatcccaggccagctgccagcattgcagcccactgatcgtgtggcattagaaaagccatcaatagtgaaacaaaataaatgacattaatgggaaagtatcaggcctacataaccatggctacaagcaaattacgtggattccaaaggagggtcaaaataaaaaaaatgccacaaatgaaatttctaaatattctaatatgattgagttaaaagacaaaatgctactataattctttagataaaatgcaaagaaattatacttaatttaatcctcttcactagaattttgctcattgtgcatatttcttttagcaggcttagcatagttaaatgcattacagctacagtatgactctgatttctctctaatgccatttatgttttctagaattatgctaagtgaagaacaaagtacactgtgttattcccatttattacaaccatgtccataatttacaagctgattatgcaagcctcatacaagggaaatcagagaatagttaaccactgtcaaagtatggtgagccagcatacatttttgtcagctacattttcttacatggaccttaaaaggaacattaagatccacacttcacattattgggaattaatattgaaaaggactatttaaagataatttttaaaaatgcattagggagaaaccaggtattctaaataagtaacagttgaatatgatacagaactaaatataatgacaaagaaatatgaacatacaggcaatgtgctttgttacatattgttttttaatgtaagatgagatttatagagaggaaaatattaatttaatcatgtccattttgtgatggtacatcctttcttgttgttctgaatttaaaatgtacacattagaaagctaataatttgacagctattttcatttgagaggaaaaagtaagagatattttgttctgtggacttgcagaaatattaaaatttcaaaatttatttcagttgtttctggcttaatgaataatagagttgataccttagaacaactctattactgaaacactaattatttctagataaatacatttcatggtccatttagctctccaagatattttattacaccaaaatcacttcaggaaaactatgttttccttttgataccacatgtatatactatgctatacaaaggtacagctatcaacagaaagaattttgatcccatcaaaataacccatgaaacgcttgacataagttatctaaatgtgtttattttaaaactgcaaaaccttttgggtgaaaagaataactttttaaaaagattcaacaaatgcacattgggttcctactgtgtgtcaggcactatgcatcagagtaatatcctaattcattcagtatctgatgtcaaaatgatatcaaatctgtaataataaagcactttgaaactctaaaaccctcaatacaacactcctccattctcctcgccatgggcttttagatgttgcaagataaggcaccagagatcactgacccatgaatagatgttatttccataaccactcttgcacctgcagatcaactgaaataacattaaaacaaacaaacaaacatggttcctgttggctgtccttttgatctcaagaccttgacttgcctttctttctctgaatatcaaaaattaggtacccagaaatataattcattatatgcaaatattctttgtaataaatatcacacgctacatttattctatattagtgaatactttatacaaatagctttcaatgcaaatttttgaagtttacttttctaaaagttaaaatttttttctttatactggaaaatttctaacactggattttgatgtctgatagacacataagttgattaaaacacaaatggaagcaaattacactcttatataatatacaagtaatttactatttttgtttttgttgtcttctagaaaaagttggtcaaaaattagaaattaaaatataatgttttctaatagcaaaataaaaactttctgtcattaactttacttaaaagagtcaacacatgttcctgaaatttgtagcataaaatatttcatggaggatatataatttgtccaagttccttagtcttaaaggcaatttaattaatttctataaagtaaaatcaacaacagcatgtccagtttggctatcttaaaagaaggtagatatattgagtaaaactttaaagaaggcatttaaccaagtttatcatcacagtcctgaaatttgcaacataagaaaaaaaatcattttattgtattttcaaaattatactttgaaaatatggttactttcaaataactaaaaaatataaaaagagcatagttttttaaaataaaatgttatatacgtaaaaatttggctataagtgtagatagtaagatagtttaactgcttcccttaagaattcatttcaaaaggagtaagtagataaagcaaatatgattttggaagtagttgaggaaactgatctacaaagatccataattgtacacatactgattggataaatatggatctataaagatccataattgtacccatactgattttctccttccctttggctttaaattcatagagatgatgaaagacaaaattaaattactctcttcttcatctggctttgatcatatccaaagtcatttatctaaacctaagccatctacagaaaatcagtggccaaatcctaaaggtatccctttacctcactgcagaatttccccaggctccatgcttgtctgtgagaatgttgataattttctggattagttgagttgctgtcacgtggtcacgatattttgctgctcttatcaaatgatcacacatcttctcatcttctcgtttgtctgcagaatactgggcacacagtgacttggagagaaaaaaaaataatactataaaaaatgtgaaaaaaacctttaaaatccattatgaaataatctttaccctaaatcaaaacaaccaaaattttaaatctacttttacattcctcattcacctaactgagatttagtgatctgctgtctcaataaaacatcccacaagaatttacttctgtgaagtcaatcatgagatacactcagaagtggtaaacattcaagtagagacctgaacaatgagacaaagacagtcttgtaagaagcaggggcccagcacgacaaacagcatgaagtgaagttgcaaaggacttgagacatagtgaataaggagaataatggttaagaaataattttcaaaaggcaggccagggctacatcatttgtattatggtaaggagtttagattttattcaaatgtaatggaatcccagaggaaagttttacgcagtgaagtgataaatttacatattaaaatgatcatatagctgctatttagagaatggattgtagtgggacaagagaagtgaagttggcagttatgaggccactgcacagggccagaaaagagacaatagcagcttacaatagtaaattgagctagttctaaatacctttagaacatgaaactgtttggtcttttaagtcctagcaaaatgtaccaagagctctgggattgcctgggatcttatttcaaatgcagagtctcaggccccaccccaaatctattcattttgtgtttgaattttaattcccaggcaatttatatacatcaaagtctgaaaagtactgtcttagatatcatcaattttaccaaaaaacaccttagaattatttgtcagtaatcagatacactataattgctagtctccaaaatgcttatttctcttcttttggaattcggatacttgtggtgtcatgtttatgatactgtagttaaggcattgtttaaaataagaaaacaaagatggatgtagacttggtcctttgttctattcagtgtctactggagtcctctcccccacccccacacacatatcctttgatagataagtaacataaacttgatgttgggataaatatttctagtttacatacggaatatgcattgtggatgcttgcctctcctacagtataccagtttcgatagattgctgccacgcactactcccaccaccaccccagcaacaaataggagtcctgattgtcctgaaccaatcgtaataatcacacccacactggcaaactggattagggaaggacacttgatgtaactggtacaggtagggcaaagttcaagatttagttggacagttggttccctccttcctctcaaggtgtaaaagaagcagcaaattctaggagtattggaagctctctgtaccatgagggaagctggcctgaagatatggccaaaatgagagcagaactatgaaaattgtagaaaaacagagctcactccagaatcatgaacttccagatcaatcaaattctcaagaccagccaacccctatgagactttttaaagatttttttttaagagccaataaactcctgctcattgtaaaccagtaaaaacatccaaaaaaattggttttttttgttccttacaccaaaagcaattcatcctttgcatggtgtatatgtacatgcataaggaatcaaatatatatatatatatatatatatatatatatattttttttttttttttttttttttttttttgagacagtcttgctctgtcgcccaggctggagtgcagtggcgtgatcttcttggctcactgcaacctccgcctcctgggttcaagcaattctcctgcctcgacctcccgagtagctgggactacaggtgcacgccaccacacccagctaatttttttgtattttagtagagatggggtttcactgtgttgcccaggctggtcttgaattcctgagctctggcaatccacctgcctcggcctccaaaagtgctgcgattacaggcgtgagccaccgcgcctggccaagaatcaaatatcttagtctgtgcaaaacactatgctagggagatgaaaagctgaattgtataaagaggaattttagaagttagtcttgggtgggaataaaggaaacctttaaagcaaaggcaaggcagaaaaacgttaatcaatttcagggagggacaaagcaagagagtttgacccaagtacaaaatacaggtagaacgagtaatagtctgaagaaactctggaatgcagaatgagtatagaaaaaagtcacaggaatcatagtatacttatatgaatgactacaagattgggaagcaaaataaaaaccaggttacggtatcacccttgctaatatctcctgtcagtcttgatcaattcactcatttacctctttaggtctaaatgtcctcatctgcaaaattagcaggttatattagatctaagattgggtcaatccgaagattctgggcaacctctgtgagggtacttgagagtacctgagttcaacctctgagagatgttcactggtaaaggcaaactgtttatttaatctaaacactgatgtggagaaaataaatcctactaagaactagaataactcatgagaaattaaaagcaaatttcatacgctatatttttaaaaaagattgacccaaaccacagaagagttcactttgtcaaaaatatgatttgagcaaataaaagaaaatgattaagaaatgtatgaaagggcagcagtttaagtgaagataactaggaaattatttcattgtaacaaaaatgtcaactgatatgtcattttttatatattcattcaagaactgagaagcattctataggttatttcatatctaacccaaccatacactaaaacaaatagtacgaaatgacagacattcacagaactgtaaactttcaacattctctactatatccatatctgtccttgtctaacttcacctaagaggaaattcaaatctactgatgagatttagaaaatcaccggtttctgaaatgctatgaaccaccacataccttcatattaaacagcattaaaagtaaccaaaaacacattattaaatagcttgtcatttctatctcttattaatatattaatttaaaatcaaattatattttgtaaacatttgataagctattaaagtttgttctaaaaggcataattctaaaaacaagggctcaaggtaagctaaacggtaaaatggtttaaagtgttctttaatggatccttctttacaatttgaacagcaacttttcatatctgacataaaatctatagatataaatcacattaaagggctattctttcctgattatcaatctctgtctctttgtggaaccttagggtcacatctgacctaaaaacatgataaaagaaaaccaaacaagaatgtttcataaagatataatgaacttgtaatattttttaaatgtccttataatgtaatttgaagatgttcttatttaaaaaccaataataaatcctatgtatgaaatattgttcaaagtcatgtggagataagaaatatttactctagaatcaaatacatattatttatttgtagtatacatatttgtgtatgtatgtatacctgtatttggaggttgagtggaggtacaagagaccttaacaaatattgctatttatcggtaacataaacggtcaaatctaaaactttcattcaactttaaggcagaattttttatgttttatatcaacttttctgtgttcctatttgtaagcactatataaactagataatataacatcacaacatggccacaaaatatttgactataaaaagaaaaaaataagcatttggggaacaattctattttatgtgattattgctaaagaaacctaagatttataaccaaagaatgaagaaactcaatataggataaataaacctccacagaagaaattcagtcactcacagtaaatagacaaagcgaccattttagctctttaaatgtaaatgaatagagacaatatttaatttttccttccagatgtcatagctctacctaattttactattcatcctttgcatgaaagtaagagaggacacaaacaaatggaaaaacattccatgctcatggataggaagaatcaatatcatgaaaatggccatactatccaaattaatttatagattcaacactatccccaccaacctaccaatgactttcttcacagaattagaaaaaactactttaaatttcatatggaaccaaaaaagagcccatatagccaagacaatcctaagcaaaaagaacaaagctggaggcatcacactacctgacttcaagctatactataaggctacagtaaccaaaacagcatggtactggtaccaaaacagatatataaaacaaatggaacagaacagaggcctcagaaataacaccacacatctacaaccatctcatctttgacaaatctgacaaaaacaagaaatggggaaaggattcgctatttaataaatggtgttgggaaaactggctagccatatgcagaaaactgaaactggaccccttccttacaccttatacaaaaatcaatccaagatggattaaagatttaaacgtaagacctaaaaccataaaaaccctagaagaaaacctaggcaatgccattcaggacataggcatgggcaaagacttcatgactaaaacaccaaaagcaatggcaacataagtcaaaattgacaaatgggatctaattaaactaaagagctcctacacagcaaaagaaactatcatcagggtaaacagacaacctacagaatgaaagaaaatttttccaatctatccatctgacaaagggctaatttccagaatctacaaggaacttaaactaatttacaagaaagaaacaatcccatcaaaaagtgggtgaaggatatgaacagacacttttcaaaagaagacatttatgcggccaacaaacatatgaaaaaaagctcatcatcactggtcattagagaaatccaaatcaaaaccacaatgagataccatctcatgccagttagaatggcgatcattaaaaaatcaggaaacaacagatgctggaaaggatgtggagaaataggaacgcttttacactgttggagggagtataaattagttcaagtattcaagtattgtggaagacagtgtggcaatttctcaaggatctagaactagaaataccatttgacccagcaatcccattactgggtatacacccaaaggattataaatcattctactataaagacacatacacaggtatgtttactgcggcactatacacaacagcaaagacttggaaccaacccaaatgtccatcaatgttagactggataaagaaaatgtgacacatatactccacggaatactgtgcagccataaaaaagaatgagttcatgtccttttcagggacgtggatgaagctggaaaccatcattctcagcaaactaacaccagaacagaaaaccaaacaccgcatgttctcactcataagtgggagctgaacaataagaacatatgggcacggagaggggaacatcatacaccggggcctgtatggggatggagggcaaggggagggatagcattaagagaaatacctaatgcagatgacaggttgatgggtgcagcaaaccacaatggaacatgtataactatgtaacaaacctgcacattctgcacatgtatcccagaacttaaagtataataaataaataaataaatatttttaaaaagtcctaaaagatttaaaaaaaaaacagaaatggaaaatgttaatagatatattctctattaaagaaattgaactcaactactttaccataaagaaatctcaggcccacatgtttatatcggtgaattccaccaaacatttaagaggaaataatactgaggccgggcaagatggctcacatctgtaatctcagcacttagggaggctgtgacaggaggatcgcttgagcataggagttgaagaccagcatgggcaacatggtgaaaccccatagctacaaaaatacaaaaattagcccggtgtggtggcatgcacctttagtcctagctacttgggaggctgaggtgggaggatggcttgagccctggaggcagaggctgcagcaagccgagattgtgccactgcactccagcctgggtgacagagccaaaaagaagaagaaataataatgaaaaaaaaatttacaacagcatgaaaaatatgaaatacttagctatattttaaaatttatacagatcttataaaaaataaaaccataaaatagttaagagaaattaagaagctagataaatgaagaaatatataatttatgtatacaaaatatacagtttatagatttaaagattcaacattttaaaaattgattttatatattcaacacaatcttaataaaaatttttagcaatttttataaaactgaaaagctgattctaaaacacatataaaaacagaaggtaggccgggcgctgtggctcatgcctctaatcccagcactttgggaggccgaggcaggtagatcacaaggtcaggagatcgagaccaccctagaaaacaaggtgaaaccccatctctactaaaatacaaaaaaagtagtttggcatggtggcacacgcctgtaatcccaggtactcaggaggctgaggcaggagaaacgtttgaaccagggagttggaggttgcagtgagccgagatcacgccactgcactccagcctggcaatagagcaagactccatctcaaaaaaaaaaaaaaaaggtaataacagcaaagtaactttagaaaacaaagttgtaagacttcacacccttcccaccatattataaaactagaaatgaagagcactggttattagatgaagaaagagatgacaaaatgaagaaacaactggtactgaaacacctggctatccacatgagaaaaaaaaaaagacgaatcttttctttcacctaatatcatacaaaaaatacttaattcaaactggatcaaggatataaatctagaagttaaaactataacatttccaaaacacaacagcagattttttttataactttgggataggcaatgttgttagactggacagcataacagaaagcatagaagaaaatcacaagaatttaaaaactgacaaaataaactttatcaaaatttaaaacacctggtctttttttttttttttttttttagacagagtctcgctctgtcgcccaggctggagtgcagtggctcaatctcagctcactgtaagctccgcctcccaggttcacgccattctcctgcctcagcctcccgagtagctaggaccacaggcgcctgccaccatgcccagctaattttttgtattttttagtagaggcggggtttcaccatgttagccaggatggtctcaatctcttgacctcatgatctgcccgccttggcctcccaaagtgctgggattacaggcttgagccaccatgcctggcccaacacctgctctttaaaagaaccatttataaaataaaaggtaagccacaaattgtgaaaaaaaatttaacatacatctaaatgacaaatgaattctttacagaatatataaagaattcatacaattcaataagacaaacaacctaattaaaaataattagcacaggatttgaacaggcatttcacaaaagatatacaaatggctaataaagcacatgagaagatgcttagtcagtagagaaatacaaataaaaatcacaataagctatcactatacacccactagaccggctgaaatttaaaagagctacaataccaagcactgacaaggacatggaacaactggaactctcatacctaccttggtggttgaattgtaaagtcgtcaactactttggaaaatagtttgtcaatttcttgtaagcttaaacatatacttacagtagcatgtagcaatcctactcctaggtatttcctcaaaaggaataagaacatatttctacaaaaataacttgtatgaaaatgcccatggtgcatttagtcataaaagtcagacactgaaaacaacccaatgtctgcctatagctgaatggataaacaaaataattcaacttagtatttaaaaaaacaaaccaataatacacacaacaatgtgaacgaatatcaaaaagtttatgctgaccaaaataatccagagtacctactatttgattccatgtatataaaattttatagcagataaaactatctataataacagaaatcagatcactggttgtctgggattggatatgagtatatggagaggaattgaccacagtggatcacaggggaattctctaggatgacaaaatttcctatatctttattataatggtaaaatcacagatatacacctttatcaaaactcctcaaattgtatacttaaaattttattacatgcaaactatacttcaataaagtttatttaagaagtgtttgtttgtttgtttgtttgtttgttttttcaggcaggatttcactctattgtctaggctggagtgcagtggtgtgatcttggctcactgaaacctcaatctcttgggctcaagtgatcctgccacttcagtcccccaagtagctgggactagaggcatgcaccaccatgcccaactaattttttcgatttattgtagagatgaggtctcactatgttgcccacgctggtctcaaactcctgagcgcaagcaatccactcacctcggcctcccaaagtgctgggattacaggcatgagccaccatgcccagcaagaagtttttaaaaagtggatggacaaggtatagatggaggaagcagttaaaatgctcataccaaaaaataggctcatatagcaaataggtaaataccttctacaaatcaatgaggaagagacagataaccaataagaaactgggtaagagagcaacatgtacttcacaaaagtaaaaaatagataatatataacaagcaggagaatagactcaattcttttaaaaattcaaaataaaagtacatcagaatgccaaaataaaaatcaccagtcaactgttgatgagaatgctgaataataaagaacaattctacactgaggctgggagtggtatatacttttgcaagatagtgtgacaatatctattaaaagtgaaaatatgaacattttgtaatcaagtaattccaccatacagaaatgcacaaggatgtacgccagacatataaaatattcaaagtgcattattcataatagctaaacactgaaaacaaccaaacaaacagaagagattatttaaaaactaatggtctacatattcggaatagctaaaaattggaaataatccaattacctatcaacagtagaaagaggtaatgaacagctagcagtctatacataatggaatactatgtagtaatgaaagagaagttgaaaaatgtaagaaaataattaaatgttggaaacataatgttgaaataaaatttccagaataaaatacatgttttataattccatttatataagggtcaaaaattgggcaagggccgggcgcggtggctcacgcctgtaatcccagcactttgggaggccgaggtgggcggatcacgaggtcaggagatcgagaccatcccggctaaaacggtgaaaccccgtctctactaaaaatacaaaaaaattagccgggcgtagtggcgggcgcctgtagtcccagctacttgggaggctgaggcaggagaatggcgtgaacccgggaggcggagcttgcagtgagccgagatcccgccactgcactccagcctgggtgacagagcgagactccgtctcaaaaaaaaaaaaaaaaaaaaaaattgggcaagaaattacagtgctaaaagaaacatacttaagttttgaaagaataaaacaaaagcaaatgtcaaccataaaattcagaacagtggttaccttaacagggcagaaaggggttgtgattggaaggctagaaaacttctcacaaactcttcgtttcagtatcacaaaaaaattaaattaatgatgttaaacatacattgtttctaaagttaggttttcagagtaataagttttttaagaaataggttataaaaagcaaatttttattaagtttgcaattaagttcttgttaagttttgaaataaaaataaactacacacaattttaatgctaaaatagcaagcccttttcctaaattaataatgtttaatgctaattaaacaatttgttttggtctcacaagttttgtatttaaaacctcttttaaagacttttaaaagaaacatatacttgcttttaaaaacaaatcaaagaacgacataaaaaagaaaaagaaatttctctcttctacctcctccctgtttggtcagctgctttctacagaggtagtcactgtttagagtaagatgtcattcctatataatggaatcaaactgtacatcattccatgtcaggaccttctttcttttacatggctacaaacagatgattacatttttagttaaccaagcattgcttctgctaaacacgtttaagtgtagtactttccttctcaatttgtctcaaaatcacttacactataaattacttgtctcactgaaaacaatttaaaagtgaaatcacttcagggacaataaatgaagaagtttctcagtatttcacttttggaggtctttgtacttgatcccttaccttaaagtgtgatctttaacaaaaaaaaaaaaaagctatctacagaaactcagaaagactcatagaaaagacagaaaaatgaaagcttagaaaatctcaacagcaaacaaaagtcaaccaatgacaatgtgtgacagccacctttaattctgtagtgattcctctgtcatgcaacgactcaaagtattgatttctctcagcatgaaaaagcctaagccaatgaaacagacagagcagcaaccccctcctcccttccccccataacagcattcaaggttaaaacaggcagaacacttatcaaagtatctcttccatttcttcttgttttaatagactggatacaacatgttgggttcttatcgttacaaactatagtcctcagacaatatttttaaataatttgaagattaatataggttattctatttttttgcttcacacttttggtaataaaaaacttgtttcaaatgctttttttttctgtgaactcttaacagaagtatatataatatttgtaaaaacaagccgacactaataagaaggctatagtttctacttgtgtgccaattccacacataatattttgttttcattatttctttagagtacttattaacaataaaacccacaaatacctaagcatcttccaaaaagacaaagtgaatccttcaacaatgcaaacacacatcatacatctgtttggaaaataaagtaaactatggctgctatctgtgttcaagaaaatagtaataacataaaatgtaagcaaaggatagggttgaaaccacagaattatattttaaaactatagtatgagacaaaaataacaatcagctctctgtatccccaggttctacatctacagattcgaccaaattttttgttttgttttgtttttgagtcagaatctcactctgacacctaggctggagtgcagtgacatgatcacaactcactgcagcctccatctcccaggttcacgcaaccctcccatttcagcctcatgagtaactgggactacatgcacacatcaccatgcccagctaatatttttctgtagagacagggtctctcagtgttggccaggctggtctcaaactcctggcctcaagtgatcctcctgcctcagcctcccaaagtgcttggattacaagtgtgagccactgcaccaggccttgaccaatttttgatctgcagttagtcctggaaccaattccgcatggatccagagggatgactgtgtatcttcacaaaatatgtataaatggttacacacagagaggtaaaattaagaagctttaatttcttaaactttactttctgctaatctgcaaaagagttagatgatcttaagcaaatcctatcatcttttaactctacctaaccaatggatttttaaaagcataaaaaactagggtcttttagttgtattagcaaggtctcctacttatgaataaatatatttgctactacaaataggtaaatcttacacttaaatatcaaggccagacatggtggctcacacctctaattccagcacttagggaggtcgaggccagcaaatcccttgaggccaggagagttcaaagccagcctgggcaacatggcaaagtcctatctttacaaaaaatagaaaaatcagctgggcatggtggcatgcacctgtagtcctagctacttgggaggatgaggcgggaggattgcttgagcccaggaggttatgctgcagtgagccataatcaggccactgcattcctgcctgtgtgagagagtgagaccctgtctcaaaaacaaaaataaatttcaaataaaagcagttcaagaacaagcatgaaaaccagaaagaaaataagcaattatgtataaaaatcataattaacaatgtagttaagagcaccaactctagagctagatgacttgagttttaactcttggttttgacacattcatgcttaagcaagttatttgaaaccctgtgcctcggtttcctcatataaaagaggagatgatgtggtatgcttttcaggaggatcaagaatagacataaaatgattagaacattgccagtcatataaaggtaacacctaacatttattgtaggcttaattgtgatgttatcaaaatacgtaacaaatagtccctgtcttccagcatctcactgtagtttagtaaaataaatacaatatgagaaagaaataaactatgagataactgctcaaagagttatagacagtatgtttggaaagagagaaaaagaaggaactattaggaatcagggagaggctgggcacagtggctcatgtctgtaatcccagcactttgggaggcgaggcaggcaaatgaataccttgcactcaggagttccagaccagcctgtagagatggcaaagtcccatctccacaaaaaaaaaaaatacaaaaattagccgggcatggtggcacacatctgtagtcccagctacttgggaagctgtggtgggaggattccttgagcccaggaagttgaggctgtactgagccgagactgcagcactctactccagcctgggtgacagaagagaccctgcctcaaaaaagtaaaaagaaaaaagaaaaaaaaaaaggccgggcgcagtggctcacacctgtaattccaacactttgagaggccaaggcgggtggatcatgaggtcaggagttcaagaccagcctggtcaagatggtgaaaccccatctctactaaaaatacaaaaattagcctggcatggtggcaggagtctgtaatcccagctactcagaaggctgaggcagagaagtgcttgaacccagcaggtggaggttgcagtgagccaagatcacaccactgcacaccagcctgggtgacagagtgagactttgtctcagaaaaaaaaaaaaaaaaaaaaaaaaaacagggagagtttcacagaggaattaaaggctaagtacctgttcaccaagaagaaagggatagaaaaaataaaatgtagaaaataaaagaggtcaaaaactaagagaacaagctcaaataaatgcatttttttaagcaaagataggaataacagaatgagacatgtaataaagagccttctctttttaaatatcctgatacatgtttatatttttcttgggtaactaatacattttttttaccaattaccttcataaaggaattattcctcaaaggtttatataaatcatttaacatacaaaatattaactagatttgtatttctcagctgatgattgttataatgttataatttctttaattcatattcaaatgtattgccaacacagaccatttcaaaacaacacacctgaatattaactgggttataaatactgtttctcaaactacctgtagggaagggccagttttgttttttttttaacctttttaaacacctttagcactgatgcctttgatgacattgccagacattcaagctataaaactttttaaatattcaatttctgtactcagctctttgtggattactaagaagtaatttagtcagcagaccatacttaaacagcactaatataaaaaggtaagtagaaggaaactatttttatcaactcaagtatttccattttgctttgtatggtaaaatacttgctttgcaaaataaaatactttgtattataaaatgcttggtcttatattcagtgctttaatttttattaataaaccagaaacaacaatagccaatattctaagtgcacatgagaaaagtctaaattataaacaaatgttgtataaaatacactgtaaagatttttaattagcttagtttcttattaatctttattttaaaatccattaagaaaaggaaggctttacattagtacataatttggtctatggttaagataaccagaagataccataaactgaaagcttaagtaaaggcttgatatatctatgagggatatattcagacattttctttgaagagattttcaatgcattaaaaggtctggttttcaaaatatattttacaagaacatactgagaagataatgaaaaaacactcttccagtttggatttaatttgatcaacaatgcctgcaacagttttacctacatataaaccttttgctttttctagcttgctagctttaatagaaatatagtaatagtaagcatccgagtaaaatagctgtttttttaacctggtgcagcatcacttaacaatttgcaaacaaaatctcatcgattcacttttaagtggtcttcctttatcccaccaatgatagttcctttagtttcacaaacagctcaaaaattattatttcttgttatatgtatgtatatacctgtcctttatacaggtaagaatatgatgttcaaaagatacctacagaagagtaacagcagaaaatattgaggcctttcttttaacctggtcattttcaaaaagctaaagttgagagtatgacaagtaaaacacatcatggaagaacctctaaaaatagtgtgttccagactaaatacacaagactttggatatgaaaactgaaaaatattattactgcatagtccaggtctatagacgctacaacatatatgataaattggggtaagagtttccttaaaaaaatttgatggtgccgttgtcactcaacctgaggcaggaaaaaagggtaacactggactgaggaaaaagcaagattcttctctaagagaggaagcaggtgatcctgaactcgagaaagaatctggtcaaaagagctctcactgttggagagctaaactggcttctgcagcatggcaaagggagacgacctggggaaagagggagacagagtcaagaaaaactgcctgttcaagagtgtggcctatgaatcctaggagatgcaatatctagtattgttttgttttcctcttctgcactgtgatgcccttctatcattgcaaggcccacaaaagagaaaaggagaggtctatgtccacgctttgggcaacaggataaagaaaaacagctactgcctggaaaagttgtttgtaagatgggaagaggtattctccagagctctgatacaactctatccagcaatagtgtagataggaacctgatggcagagataagagtcctagattcactgtggcacatataagcattcaatttccagagattacttgaagaaaaaaatagctgttattaaacacttaatatggattcagagtaatgggtacattaggtttatcaaatcccatttattcctgacaacatagctacaggtaaacatcattattatcctgatgtaaaggtgcagcagtggtgtcttacttcacatggtttagtgaatgacaatgccaagactagtcaacaattttatctgatgaggtagtcagagctaaggtcaactgctgcagagtaatcatgtctcactggttgggtattcaaaccctagcaatttggacattaaaaagaacttgaatacttgtcagttggttatactggtagaggttgagtatcccttatccaaaaattcaaaattcaaaatgctccaaaatctgaagctttttgagcaccaacatgaccctcaaagaaaatgctcattggagcattctgatttccaggttttcagattagagatattcaaccagtaatataatacaaatattccaaaatctttaaaaacctgaaatttgaaacacttctggtcccaagcattctggatacgggatactcaaccggcattttatctttcatatttattgatattatttttatcaaaggtgaagaaaataacaatgatagaaaacagaaaagccacaatttatatttgtatatatagtcatgcatggcttaatgacgagggcatacatcatactgtttatagcctaggagccatacaaatatgtacagtatgttactgtattaaatgttgtaggcaactataccacaatggtaagtatttgtatacctaaacacagaaaaggtatggtaaaaatgggtataaaacaaacaaaaaaaatggtacagggcacataccatgaatggagtttgcagcacttgaagttgcgttgggtcagtcagtgtacaagtagtgggtgaatgtgaaggtctaggatattactgtatactactgtagactttataaaccctgcacagttaggctatgctaagttaattagaaattattttcttcaataataaattatccttgctcactgtaacatttttacttcataaacttaaaattttttaaaattgtttaactcttttttaataacacagtttaaaatgcacattgtacagctgtgccaaaatgttttctttctttatatccttattctataatttccttttttttttttttgagacagagtcttgctctggtgagacagaggctagagtgcagtggcacgatcacagctaactacagcctcaactcactgggctcgagtgattctcccacttcagctttctgagtagctaggactacaggggtgtaccaccacacccctggctaacttttttattttttgtagagacaaggtctccctatgttgcccaagctggtctcaaactcctggactcaagcaatcctcccaccttgaccaaagtgctgggattacactgtgcctgatctataaaccttattctagtttcaaatttcattttttcaatttttaaattttgttaaaaagtgagacacaaacacacacattaggctaggcctatccagggtcaagataatgaatatcactgccttccacctctacatcttgtctcactggagggtctttggggcagtaacatgcatggagctctcatctcctatgatgacaatgccttcttctggaatacctcttgaaagacctgactgaggctgttctacagttaacatttttttttaataagtaaaaggaatacactctaaaataacaagcatagtatagtaaatacataaaccagttacacagtcgtttaatatcattaccaagtattatataattgtgctgcactttcatacgaatggaaacacaagtttgcttctgccagccttaccacaaacacgtgagtaatgagttacactatgacattacaatggctacaatgtcagtaggcaacaggagtttttcagctccattaaaatctcataggaccaccactgtacatgtggtgcgtcatttaccaaaacatcattatgtggtgcatgactgtgtatatataaagcaaatattgtcaagcttagcatttcgtggttcctatgctagagatgcagaaatataaataaagacattaactaaaatgtccaaaaccgccatggtagtagatatcaaaactggaatgagaattgacattctaatactttgctatcaagctatgatgacacaaaatctatcaatccatcatctcttcactaaatgacaaaagtgatcaacacaaagtgtatatcaagggaggaatgtgggaagagaaaggggtacattaatcactgaggcagaaccatcctgggccaaagaatggtattcttagttttaaaaaagttgtccttgactttgaccatccttcttctcactaagggtttttaagataaggtggccaactagaaacagaaaactataggggaaaaagttaggagaaaatcaagcgggagaataaagaagaaaagacaaacaggaaagcataaatagcaggttcacataaaattacttttgcactatttcctaattatgagtttactttaaaagctagtaagaaaaaatagtattataagatttcgtttgcactgtattttaaccactaaatgagaaacaaaatggggagttcaattcagtaatggtaaaaatgagataatggacaaaggtgggaaaaaagtttgtcatttaactaatctttacacagctcaagacattttgcactctaccaatttcacatgcacataggaaaaaacatataaagtcattagaaaagagcaaggtaaacagaaataacaaatattcaaggtgtagtttcaatcatcgacaaaagtgaatgaaaaggaaataccaagataattacataggtgagactccaaataactaatactgccattttacaacctatgttttagaataaaaatattacaagctacagatttgagactacactaatgagctttaaggaacctcatattattacaaagaaattaagtatcctatccaacactacatagttaattagtggcagaacaatgcctaaatcctagttcttacaaatcccaaatctgtgctttctatcatacactacagactgcaaaaacgattttacaacttacgtgtaattaaatattttaaattcatgctcttaagcatgaatttaaacatgctttaacaaaccaactcaacccttaaaaaaaatccaagtattatacaaagtccatatttcaaccatcaaattgttaagttcagaaataattttcatagagatttaaattccggccgggcatggtggctcacacctgtaatcccaacactttgggaggccaaggcagggggatcacctgagatcacaagttcgagaccaggctggccaacatagtgaagcccccatctctactaaaaatacaaaaattagccaggcgtcatagtggacgcctgtgatcccagctactcgggaggctgaggcgtaagaatcgcttgaaccctggagacagagattgcagtgagccaagatcgcaccactacactccaacctaggcgacagtgcgagacttcgtctccaaaagaaaaaaaaagtatttgcctttatacatcattaaatgctcattaagaaaaacagcgacaatccagtaagcaatgctagggaacaaagtgattactttcttacttgctgtatctactaggatacaaacagaaggtaatttttaatgaaacattatcttaatattaaagaatctaggatctcaaatgaaaaaactgattcctcaaatttatgttagctggatatggaaatcttctttaatcctaacatatgtcttctattactgacaatttcattcattcagcaattctttgggagcttcctatgttccaagcctataccagatgttgaaattaaaataaaacagaaccttttataaagaagtcaatatgtaatatttgtttccctcagtagtcaccaataatttcaaaacatttttaatggttaaaagtaattctcacaagttgtccaagaagaatataatccagaaattgctaatgtaacgtccataacaaaacaaaaggtagtaaaggtcagcctttaacgatttctcctacatgattgtaataagagaagtgatacatacaaaccatacagacccttacataagaaaatctcaagacagaatccataaacatgtaaaaattacatgtaaaatgtgttatatttgtatgaatttatcaaggttagattctcaaagagtccattagcccaaaaaaaaaaaagaactattaactcaaaatataaagaacagaacatttcacctaatatcccatttttgagccagactaagtggctcatgcctgtaatcccagcaattggagaggccaaggtgggaagatcacttgagtccaggagtttggaactctcctgcacaatatatagcaagaccccatctctacaaaaaaaaatttttttaatgttagccaggaatggtgaggcacacctgtagtcccagctaaccttggaggctgaggtgagagggtcacttgggcccaggggtttgaggctgcaatgcaccatgatcccaccactggacttcagcctaaaccacagagccagacgccgactcaaaacaattatgtgtgtattttatatttgttttatattatgaaatagatacacaaataaacactcataataaaaagcctaaaatgctatgtgccaaaacattgtcttgcctcttggtggggcaaagatactggagaaggttctctttttattattatcattattattattattatttactgttatatttttcttcttttctttgctacagtattctccagctcaaaaattaatgaattaaaacacaaaaagagccactgatctaaatcaaatttttcttaggtcagggtatttcaggttaaccttctgggaagtacctgaattctatttttaaaagaatttttgatttcatttatataatagtgccaataacaatagatttgggcatatctacattatacatatatagaagcatttcatatgcttatagttcttatacaaacacaatgaaataaattacaaaataagttgaagcagcagcacagaatttatattttttgtgattgtgtaaaatgaaatataatttgtaataaattgataatcactagattggactatcatgtaaaaatagcatcaaccaagccatgaaaattgttaaattcagtctatttaacaatgataattgataatgacaattaatgacaaaatttcttttgcataataagaatatgtgactcaaagtcatttttatagactaagatttcagtatttacttaacacatacagcagattctatactacggaaatggcttgttgtaccgagtaatgtaataattgtaatattgctggttacataaaaaaatgaattcacatgaagtgatgtatcatgtactacatgaataaaaatttgacagaagtttaaaaatagaaaagtaaaggcagattatggcacagacttcaagttatttgcccaaatcctcttcccccttcaatagtaccaggggctcctgattcttaagagccggtaaccgtctagaatgaagtgtatatttcccaatttcataccattttgcttttattaataaagctaatgaaaatctgggaaggaaaaacaatgaatttaagttttagacaaagtgaatataaacgggtaagaagacacctaggtaaagaaatatggcagatttttgaaaatgtgaaactggaaatgaggtctgcattatagtcagtaacattaaaggtgaatcccaccaaacctttaaaagagggtaattccaatgctacccaccctgtctctgggcatgaaaaaagaatggaaattgtaaagttattcacaagaggcaagtataacactgaagctaaaacctcacaaatgactaagattgcatagaaagttaaaacaaccacaacccaatttaagaatagaacatgacaattacaaacaaaacattagcagatacaatctggcaagattaaagaaaaaactaagaccaaaatatattggcataatattgacatatgtaacatcaaaaaaagtatactatgaatatcaactccactgctccacttaaggatgacaaaattgaacattcttcatttacagaaaaactccataaaaagtactaaataaatatttcattaaaatgataaagcatatatatatacttcagatcaaaggctatgtcatacttagtagggaaacactgaaacacctctgctaaagtcaggaacaagaaaaagatgctattattttttaacatcacactggtgatagaagtcaattcaattagacaaggaaacgtaattacaagaattaaagttggtaagttgataccaataaaagttggtaaaactatcaatatctgcagaagatgtgagtgcatgcctgaaaagcccaagagcatcaaatgaaaacactcttttgaatcagacgagctgaatctaatgttagattaacaagccaaagaattttgaaaaaagaaattcaaaagggcaataagaaggaggaagaggaggagaagcaagaggaacatagacctattagtatcaaaacacattgtaaagactcaataattaaattgattaatatgctagcttgacactagtatatgaaatcacacacagactaatgggaaaaaaatcaaactcgaaattgaccccaaacatacaggcatttagtatataacagtagcatcttaaatgaaaacttagactaccgggtaggtggcatagggaaaactaggtaggcatataaaataaattgaattaataacacaatctgtactaagataaattccaaataaattaaatatttaaatttaaagcaataaaactatagaaatattagaagaaacatatgggaattcctttataatctatgtgtttctacccttccaactaccaaacagaaattgagatccatgagagaaaatatccacacatttaacaaaaaaaaaaaatttaacttctgtaaggcaacaaaaaataccatcataactaaacaaacaaacaaattggtaaaaagaaagaaaaaattctaacatatatcacagagttgattccttaatacatgcagagcttctaaaacaaaatcaataagaaaagagacacaatcaatggaacagctgcaaaggacatgctcacagaaagggaaatactaaggttcagagatcatcaaactcactcataaaaaaccaaaaatgtagtttaaaacaacactgagaaatacaaattaaaactctacactaccatatataacctatgcaagtgacaaaagtccaaatatgcttcataacacattctataaggaaacattcacactttgttgatcaaagtataaaaattcttcagaaaataatattaagtttaaaaagcaaaatacagaacattatttataatatgctagcattcatacaaagaaagataggaatatgtatctctatttgagtgcatatgcataaagaaaccctgaaaaattcatctaacagtggttttctgtaaggataaggggtggaaggcatcctggaagagattagaaggagatttttcactgtgtgctttcttataattttttattttaaattacctatagaaaaaactaaatgaatagattgaaaaattttaaatacttaatatcttctatataaaagtttcagataaggtagacatgagattgttaaaacagcacagaaaagttaaaactacaaagaaagtattcctgtgaaagacctatacttttaaaaaagcaaaagaaattggatgaaactaataaaagattcatgagaaataaaaaaccaatcagaaaaacatcaagaaagtcaagcaaaaaaggagtttaaaaatggaagggtctgtcatcagtgtcaaaaactgcagagaccaaggaagataagaaataaaaaaggaccactgtatatataattagtagatcagtaatgatattgaaaacaacaagtttaatccatttgtcctagaattggggatgaaaaggagaggagagaagccaaactatgacactgaacagtggaagggggtgagacaataaagaccattctagcaaaaaagtctggtagaatcaaaaagcaagagagaaaatggaagcttgagaattccagcagcatttaaacaaggttatcaagctctagcatatgataattagacagaggcatgaatatataaatagtgagaagctgcaacatacttccagaaaggtcatttaaaataaaaaaattttcagtgtattaaataataacttcattcaaaataatacacaatttgctaaagaaaaccagacattagtcaataaatacaaaaattacctatgacatcaagtaaaagaaaataagtcctttcaatcaaaactactcttaacaataagcagcctatttcatacttaatgagggcctgcaactgatagttcataatattctggaaacaggtatcaaggcaaatctcacaagtaacaggcgcatcatctaaggatctttttcacattaagaatcctattagaaagaaaacactaaaaggtaattgaatttccctcagttatcttcatctctgtcagctcctgctacaataacttactctccagagcagagataactcaattctgttcagcaagcatatgttatgaatctccaaagcaaacttgtctaaatcattctggtcttctatcaaggttgcctgtggatatgaactctgacagaaagcaaacaaatttatttttatcttttcaataattcacttctttatgccttgatagaagaaatcatgagataaatatatggtctacagttatgttataaagtcgggctgaaatggtttccatgacttaaataaaagacttaatgaataatccttcttaaacacaaagaaaatggtatcaaaaaatagaattggtaaattacctgaagtttcaatttgtttatactgttgccagatccttattatgatctcacaaatgctagtttgactatttcatttttgaagctttatagtaaaacatgttttataaaatgctagaaaattgaatttttaaaaaagataccaacaaaataaataatagttcatatgagaaaatgcatttcttatcggtattttaagccagctggcattttataacagaaaagaattaaaaaggctatataatagagacaaaaattctatgagtgtgagtttcttaagttggggtatacatagatcattgctattcagaacaaaaaacaatccaaattcaaattgttaatgaatacaaccctttcagtcataatccctttcctttaacacaggttaaatttctcaaagattctggcttggctattcatgacctttaaattctacactagtggtcacaataatagcaacaatgataatcactaacacacttcataatgtgttttaacctacattatataattttactctccacaataaaccttttattaacgtttcattatatccatttcatagaagggaaattaagactcagagaggttcaatgaattttatccaatattctccagctaataaattgtgaagcctagaacccgaacatgtttttggaaaccatgttccttctatcacattgtaacacactgtttcaaaattaagttacccttaaacagcagagaaaatgtcaaaaaatgtagccaacaatgcgccttgaaattttgatgtaaagtgtgctaacttgtatttcataaatcaaatggcttatttcttcatttcaagcacaatcagtatgtttttggattgaagacctaaagcaacccattgcagtaatttgagacgctattattaacctataactcctgctaataataggctgaaaataattctaccttggcctttctcatgcataatccatttgtttccatagagaaccatccttactacttttaatcaggtaaaaaagaaatcaaatgtgtggactgtaattagtactcatttattgaataattatttactgagcacctactatgtataggcaatgtacaagtctctatggatatgttatgaatagacatagagttcttaccttcatgaagcacacaaaagaacgaggcaggaaataatcagggaataaaatatataattacaaacaattattaagtgctatgagatattataacagaaagatcttagttagatttacattgggtgattggtgggggtaaaggatgagaggcagagaaggcttctgtgtaaaagtgacacttgaaggaaaatctaaaagatgagtagaagatgaataaaagggtattgtgactaggagcaaaggtaaatggagaatgaggttttgtggttgatattaaggattgtaggtttaacctaagagcaatgggaaggaactggatgtttctatgcatgaacaacatatactaaatttcagaatgactacactggctattctgcgtaaaagaaagaaaatataggtggggaagaaaaataagacaagagattactccaaatgttttgaactatagatgtgatggttaagataacaaaacacagtattgataacaaatgtttttggaggcaaaataaacagaacttgatggtggacagacattaagtgtgtagtaagggaaaaaatgggtaatgggtgatttatgtaagcaagtaagtaaatggaagtgatatttctcagatgggaaaaaatggaggagtagttaacaggggaatatacagttttagaaagtctctccccaaaagtggggcttcttataagaaatttcaagtggcaattacaagtatacagtggtatcacacaggtttgaagctcggaaaagaagtcacaaagacaaaaatcagaaagttttagataataaacaaatgctaacaaaaatagggggaagaggtcctcagaaatattgggtcaaagtgaaaaaaaaatactatatttaattaccttaagataattttccattcacagaaaaaggatatattctggcccagctcttgattacaggtagtaaacatgagccaaagagacgtaccaaattccctatttttcttctttttcagataattagctaatctttatatattacttacatgtgaattactttgaccctaaacaaggcagtgaagaatgagtgctttacctcctacagctatctatcttcatgtaccaataacgtgaggaaagatgtagactcattaattagaagaaaaagaggcccttgtttattagaactacactttacgtctctgcttgcaaactcaacatatcagttcggttggctaaaggatactattattcaggctaagtttacagttctatctctgactgagagctaaatgtcccccaaaaagcaagttcatgaccacagattgcaccactaattcccaggagctatctcataaataagtaacagacgtataaaagaaagctacatcaaaaaaaatttgaaagtttcagtatgaaccccaatgaaaaaaaattgccttacctgaatatcttattaactagagggcagtgatatttgtatgcacagagagacccttttgtggttaaaaatcacaggtttcaggtataacataggaaacatagtgacacaaagaagtcaaatctaagaagttaattttttttttttttttgagaaagagtctcactgtgtcacccaggatggagtacagtggcaaaatctcagctcactacaacttccacctcccaggttcaaacaattctcctgccccagcatcttgagtagctggaactacaggtgtgcaccaccacacccagctaatttttttgtatttttagtagagaaggggtttcaccatgttggccaggctggtctcgaactcctgatctcaagtgatccacccacctcagcctcccaaaatgctgggattacaggtgtgagccaccacacccagctggaagttaaatttgcaaccacaatataatttcaagagttgtatttttaaaatagcattgtcaggtatgtcaaagcaaagtgccaagtttatttagtaagattcactaccttctagagaatatgtaagaaaccatcaataactataaataactattaaaaaacccatcaataactataaaggtacttatgtccagcagttgtaaaaattacttttaaacacatttctgtgtaacttctcctaccagagtaatgataattgggacacaaagtgccaaagtaaaaattatttgtgcaatgtaaaaaatacaggaacagaggcaataatatcaataaaagaccttttaaaatgctcagtatcatcaatgggtctcttctgaattcaaaagtttactcactgatgtttccaaggtttatgaaggtactcatttagaagagctcatcattatataatgacaccctatctagtccatttcttatcattaaggaagagaaatcattttttactcaattcttctggtgcaactcaaggacaggcagtatactgtagcgattaaaagagcagaacataaagttttgagttgaaatcactgagcaatttattaatcagtctttgtcttttcttcatctgtaaaacagagataataaataatgcccacctggctcatgggttatttattgtaaggattaaatgaatcaatgtatacctgacccataaaatgtatgcaataaatcatagctactattaatgttattagtatccccatcctcaacgtttgagtatccagttagggccaggccttgtaagtaatccttaaagatttaatgactacaaattccctaagttctaagatagtccagatacattaacatgttgatgactatattataggaataaaaaaataatgtgctcacaattgtttgaactaataaaaaaccctttagctgtctaaaggaatgccaatgtcctaatcaaaacataaagtgaggtaaaagtttacaattttttctccagaagtaatattttcatgtcatgttctctcctcagaaaattccttaacttgtcacctgacaaccaaatttcacatttactggcaagaacgaagcaccaaaaaagttcctgaatatagcaaaatatttactgccaaaaaattacgctacgattacaattctactggacaagacatgtaaaggagagaaaacagcaacatccctaaaaagcctttatcaaagaatactaccaagctacaaaacggcaaaacccaaagagattcctacttaataagcaaaataaggagtggttcttttccaatatatcacacacacatttaggaggaaacacaaaaacacacagaaacattatgtttcgaaaagccacaaagaaaaccagttttttggttttttggattttgtgtgttttgagatagggctttgctctgtcacctgggccatggtacagtggcccgattacagtgcactgcagcctcaaccacctggactcaagcaatctgcccacctcagcctcccaagcagccaagactacaggcatgtgccaccaagcccagctaatttttaaatttttgaagagatggggtcttgctatattactcatgctggtctcaaactgctggggtcatgcaatcctcctgctttgacctcctaaaaggctaggattataggcatgagccactgcatccagccacagttctttataattcaatcacaaaatgttgttggtatgatcatctgtaccataaagaaatataatcaatgacatctcagttcatcagccattgtcatacaaggcactgtttgctacacataggtagagaaggaaagttggcatattacattattctgtcctatgttcaggaggcaacattccttacaatttttcctgtgaagaggatttcaggaactcggaaaaatcactcaacaaaaggaaatgacaagcaaaaagtccaggagattgattttcaaacttttggttttggcagtactctttttgcctatgtaactgtaacgtggcaaagtataatgaaacctattcttttaaatttgtgttttaacaatatttgtctaataagtgaagtaaatttttatgcaagcccaagaatgtaatacagataaaatcatgtggcctatccctgttcacagtattgcctgagataccgtaagtgatgatctaaagcaatgagttttgaacatatcacttctagtttgatgaaattagggaggagttaaagggatttacaatgctaacagtgaaatagagacacttttattaaatcgacaaatacaattatcacattttccccatataaaaccaaagacatgaggaacagaaggatctctgggtaaatatgaaataaactttgaccatttgtggctgctgatggagatcagatgagtgtgctcctaacaaaaatattcaattagtttgtgagccagtctgatagtttagaggtgtgctattcaagaatggtcgatcaacgtttctgatgcaagtctaagtaccacttctttacactccacaatgagataagtatagaaattgagggaatttagaaaggtttatagcaagtagacatggccacagcatccaaccacataatcagtggactcatctcaataaagtttatgtcttactgaattccctttatgtggatactagttatgtacagtacaaatacattatgtctaatatttcaagaacagtttataatttgtaactcaaatgtacttgtttatataacatttttacaattattttaatgaaagctattattttaaatttatgttttaacagtatttgattaatatgggaagtaaattttttattatctagttttaacgatgtttacaattagcaaaacaaacttcactagacttatttgacaaaaaagacatgccttttcataatgtatcaatagtagcaaacaaatcataactgaagtaattacaagaaaagattccaatctaactaaaattttatatcctaaatttcaactaataggaggaatgagttcaagaaatctattgtacaacatggtgactctagttaataccaatgtattgtattcttaaaaattgctgagagtagatttcagtgttctcaacacagaaaaatgatatgtgaggtaatgcatatgttaattagctatgtttagccataatgtatacacacttcagaacatgttggtataatatttaatttttgctcattaaaatatatttttttccaatagaatttataccagttttagtctaaattaagattgctaatatagtgagttcagttttgagaaacaaggccatccacattcacctaacaagcagggttaaaaactgagacaccagagtcaatattatttcaccatttgtttcaggaaatcctaccccaggaagataagattgcaaagaacaaataacttcactgtttgcttcaggaacaccaatgtatttgaataataaactgcttatttagacaaacagtctcattttcagaacaataagttactcaggaaaaaatttcacttaccaactgtttactaatcaacacctacatcagaaccgttgcctcactttctcccaatcctaaaatcttctatgataaatttatacccaaccacaatcagacctcgtattgaaagacctaagatgtaaaccatttgagttcatacctagaaactctataaatacccaccccaacctctcaccctgagatccttctaagatactgtcaaggttgcattctcatttagtgcagtatataatcaacttagctttgccaggctattctggtggtggtcctgaacagttgagagatggcagtagttttgtagccataaataattaagaattaaaaagaaagtgtggctatgtgcaaagatgtaataaataaaataataaaaacaaacagtttaaataaaaactgcaaagaaaaatgttcaaagtcaaatgaaatattgaaaagaatactgaataagccaacaaaagcagacatttaatatttcacataaaaactacattgtttggtgtacttataaaataccacatcaggttgccaaaatttaaatatgtatattttatttgtatgttttgtgtgtgcacaattgccaagtgttagtgaaagactacatcataagcattttcttcaaaatgttggtgagttacagacacttgccaatgagaccagaactgaatgtattcaggaactgattaatgaacaattactaatagaacccaaaaactagctaagtacttttcattacaacttaaagactgcattgatattgctaagagaacattttgtttttaagaataagtgatatttgaacatgataatatgaaggaaaaatccttatgttttttagatgcactagtgacaaacacaactacattgctctgaagaccatccatacacccaagaagaattatactgtgagcaaatatgatttggagtctgactttcgtttaggaaatgttctgatgatatagctcgaaacaaacatcgtgtggtggttaagatttaagaagtggaaccagtttccttcatcaacaaagccttgataacaacaaaaaaaaaaatcacttacagtgtattagtgacaacataaaaattgctaattgggctgggcgcagtggctcatgcctgtaatcccagcactttgggaggccaaggcagatggatcacgagctcaggagttcaagaccaacctggccaagatggtgaaaccccgtctctactaaaaatacaaaatctagctgggcgtggttgtgggcacctgtaatcccagccactagtgaggctgaggcagagaattgcttgaaccaggcaggcggaggtttcagtgcataaaaaaaagaaaatagggtaaaaaataggtatgacctttgcattaccttcgcaacttgttttacatctatagttatttcaaattagtcaaaaacaaaaagcaaaatccaacgaagataaacagatgttcaagctaaacaataaatgactttcactctttacattttttattttctaaattttctatattaaaaaatacttcatttttataattagaaaaataaacacgtttaaatttaaaaatcgatcaatgaggagaaaagcagctacttaagaggaaaattgaataatttctcatgattagctctaaaattggtatatacagtaccctaaaatacataacactaaaatatgtaattgttaaaatgtttcacattcctttagaactgtcaagaatatgttcaataatagaatatattattacaatagcaaaacactgccatgaagtcgacagaggctatggggacagactgtactgggttattgttatgaaacctgggttctaattcagaatcatggatttaattgttctgtgatcaaagctaaatcacattctctcaatctaccttgcatacatacatcaaagatgtgttgtggtactgaaatgagacaatgtgtactaaatcacttaatagatgacgttaggccacatagcaaagagatcaccagtttatactgggtatcagactaccctggttcaagtccaagcttcatcatatactagctatatgacctaaaacaaaccactgagcctcgctgtagttttcttatctgtaaaattgggctgaagataataacatttacctcagaggactgttatgataatttattttatatttgttaagaattcagaaaaacaagtggtactatagaagtgtttatttttaaaaatttataagtactcacaaaaatgttcactattttaataaaaatattttgcttgctaattggaaaaaaatctttgaattcttcacctaaaaaatatatagattgctatatttgccagacatagtggctcatatatgtaatcccaccactttgggaggcttgagctcaggagcttgagaccagcctgggcaatatgacaaaaccgatctctacaaaaaacaaaacaaaaattagccaggtgtggtggtgtgcacatgtagtgccagctactcgggaggctgaggtgggaagatcacttgaatccaggaagctcagtttgcagtgagccaaaatcgcaccactacattccagcctgggtgacatagtgagactctgtctcaaaataacaataatagtaataataataataataataataataatcagtgctttcatggtctttatttaataaaaaaaaatactccatttttattacttcaaaaaaaccgagagaccacctggtttgcagttccactgaagctagcaacaagtgagttctacagtatgttagataaaattcaaagcaacattggcccaaagaccttttgaaaattcttactgaagttgattttaactcacatagattcctaaaagaaaaatcattaagtgataatcatcagtacatatgttttacagatatatcacattagtttaaagaaactaaaattctaaaagacaaccttctttacaaaaatgattgccaggaaacttgtatattcacacatgcacaatgtttacaaggtatgatgtttctgcatgacataatttttttcataaatattctgtttataaccataagattaagaaacaaagttaagatgtacagctcatcaatgatgtcatgacattcatggaacctctctgtaaaccaaaagcataaaatgtcaaggatatcccactccaatgataagcatgcaatgaactaaatagatgcacattgcagatctacactgtcatcaatcctctgataataaatgaaacaagtcagctactttacacacaaatcgtacattaaatagatgacaacatctttttttgcagaagaaggtaattagcagtagataaaattcagttatattatttaagaatgtacagcttgaattcaaggctgaatacagataacctctaagatataagctgtctcaaaaaaaaaatgcctcatcctgcagagtattgtttaagagcaatacagttagaacatgagcatacttcaaccaattgaagtttgttgaaaaagggtaaagactagcagacataagaaaaaatatacgtttgctctcttaaaattgactctgatgtagaagagatgaacaaatatattttctctgctaaaattttaagtaacaacaatatttatttggaaatatttcttgttttatttagaaattttattataacaccttaaaatactacacaatattgcaaatctcatagcacaatgattaaaatgaaaaactatattagacaaaacataaaattaaatagcttagaataaagctgcaatgtattcgaggattagatcctattcacacggtctttagaaatctaataaaatttgaaccaaattcatagattagtaattgggaaacagattacctggatctggatccaagttgtaactctaggttatttctacttcatgctattttcaaacttataaaatgagggataatatcagtactatctcagaggtttgttgtaagaattagttgctacttatatatacctctaatagctactgaaatagcataaggattcatgaaatattagctactgttggcaccatcattcctcaccgaaactgaaaatatatatacttttcagatcaaatcaatttaatctctttcacaacagagttttagaaacatttcttcaattttcaattccacatttccaccttcctcgttctctctcattcatacaccaattccacgtttactccatcattctctctcattcacacacaaaagaacacacactacccaccaccacaatcactaaatttcaaatttaaaaaaagtgcaatcttaacccatagttacaacaaagaaagcatctccataattaattagaaagtacactaagaaatagattccaggttaggatggtaggctgatattgcaattacatattttttccttcctcatttcctaaaaacaaattagcaaaaaataaataaataacaaaaaataatttttaaaaataatgaaacaatgtaaggaatgtaccataaatcaccaaacattaaaaaattggttgccaaggggaacaaaaacaaactggttctagaactgagggagcaacaaagcttagttcttaatcatgtccccatgcccccaaagcaatattggtaagttgacaaaattctgataattttcttaacgccttcaaatacagagagaaacaaactgagtaggtaacgttacctctttcctcttctacctggagatgccagaaaaacttacagaacaaatactggtgaagcaagaaattgaaaaatgcggctgattcactaaaacagaagtaaactcgactctactctcttaaatgactgagggaaatgattcaaagcctaagcacatcttcccatgagaactgtctatagtctaatgagatagaatgaacttggtagaaaatatttaacaaaatcttagaaaaaaatgaggatttctaagaaagactcctcacctatttcaaataagctcttcctcttcatgataggccataggatattctacaaaaatcaaactgtagctcaggagagggaaatattagctttacacagagaatggagagggaaataagtcactaagatatcctgttgtctaagccaacagaatatctgcacagagcattctaagaatgaacacaatggaacaaaaaagtatggtagttatacaaacatatagcaccaatcaatcaacaaataagttaatacataaatttaaaataaaacgttaatatagaaaagacaaaacatctgatgaaaaagtatctcaaggagtaaaagaaaattattcatgattattttttctaatgaacaacataacaaaaacataatgcaaataagataaaactcaaaataaagtgactaaggaaagaggctgaagtcctaaataaacaaaattaggaacaaaacataagctttatagacataataaataaattacaaataaatatcccggacaaaataaaacattaaaaatgtacttactggtggaaaaataaggctaaggatcaaagaaagtcaagcaactaaggaataactaatagatgtgaaagacaaacatatatctaacatattattaagtgttactaagcaagaaaaaacaaaataaagtgaaagtggtatttcaaagtataatctaaaaaattttctaagaactgaaggaaaaatcagaatctgctgattataacaagaaactatgtcccaggataatttgataaataatgttcaatactgaaccatattcctcttaaagaattttttggacaaagaaatcacaggcagaagacacaaaaagcaaatcagaaattaagggaaaatatcagactgtcctctgaaagcaacattcaaagtcagaagataacaaagcaatgtctgcaaagttctaagggaatttaagtgttacccaacaatattaagtcaagcaaggcagtcatggcacagaaagagggagatgttagagattacaatttgactgaggaacagaaggcgatcaaggccaactatcctccagttaataggaattatgagtatttggatcatacagcagatgtccagttacacacatggggagatactctggaggaagcatttgagcaatgtgcaatggccatatttggttacatgatagataccaggactgtggagcctctccaaacaatagaagtagaaacccaagaagtttctacttttctttttcactttttagatgagtggctttataagtccaatgctgatgaattcttcataccctgggaagtgaaagtactttgtattgatcaaagacatttccaattacaatcaattgggtggagagaagaattttcattgtccaatcaccctcagggaaccgaagtcaaagttataacatattcagcaatgcaggtctataataaagaaaacccagaagtttttgtgatcattgacatttaagaccaaaaaagaaaagactcctaagaagaactgggttttttttttttcctcttccttttgggaagacaatgtgaattaaattctatagtatcttatgaaatacagaaattgtagaacaaaaacttataactttatttatttacttatttttcctgagacagagtattgctctgtcccccaggctggagtgcagtggcacgatcttggctcactgcagcctctgccttccagattcaagcgattcccattactcagcctcccgagtagctgggactacaggcatgtgctacctcacgcctggctaattttcgtatttttggtagagatggggtttcatcttgttggccaggctggtcgcgaactcctgacctcaagtgatccgcccaccttggcctcccaaagtgctggaattataggtgtgagccaccacgaccagccagaaatttacaacttgaactgtgactttccaaaatggaaaattagggcatgtccttggtctgtgttccccaaatagtcaatctttaaagaattcttcaattcctacggggcagttatggtccttcatttgttgatcatctgctgtggcagcaagtgcctcatgcccttccattgcaatgcaagccttccaccctcccctcagaacagaatgctgatgtcagcagcagcctggtgctaaatccaatttggaaaaaaaaataatttgagaaaatatatttccacacccagaaaaaaatatataaagttaagcagaatgccattcaaatataaagatagcaggcaaatattcttaaacatggaagaactttaagtttacaacacatataagccccttgtggaaaaagaataaccatgaaatgcagccaattaagaactgagtcaaaagaaagaatctggaaattaagttccaactaataaagttggggaaaatgaagagtgagtattgaattcacttaaataaagaacaaatactcaagtactataagaaatgtgattataaacatgaatgttataaatttagacaatatgaaaattaaaatataactaaaaattaggaggtgaggggagagaaaataaaaggaacatacaagtgactaatatcctcagcctccataagagagtgtgaattgacatatgtaacataaaaatcaacatcagaggagggcagagcacgatggcagaatagaggcctatcccgtttgtccaccctgctgcaacaccaaattttaacaactatctgcacatagcaaagcaccatcactagaaccaaaaatcaggtgagcgatcacagtacttgtttttaacttcatatcatggaaagaggcattgaggggggcaggagagacagacttgaatcactgatgccacctctgccccatcgcccagcagtggccatgcactgcagacagaaactgcactttggggaaggagagctcaacgactggagaactttacattggtctcagtgctgccctgtcagagcaaagaataaagctatgctgggctccttccatagagggagcatgaggaccagccctagccagaggggaatgacatatcccaggggacagaacatgagtttcttggcaagcctcgccacgcaggctaaagtacactgggttcctagataaacttgaaaggaagtctaggacacaaggacggcaatttctaggctcctcctagtgctgggttgggctcagggccagtgaactagggtggcacatgacctagagacacaccagcttgcgtggctaaggaagtgcttgcattagccgtgccctaaccccagggagtgaagctcatagcaatgaaagttactccttgcttctgcttaatgagaggagagcaaagagtaaagaggactttgacttgcattttggataccagctcagccacagtaggatagggcaccaggcagagtcatgaggccccgttccaggccttagctctcagatgatatttcatttctagacacaacctggaccaaaagtgaacccagtgccttgaaggtaaggatccagtcctggtaggattcatcacctgcagattaaagaactcttgggccctgaataaccagcagtgataacgaagggaatataccatgtgtcttgggctttgagacttactagcttcaggggtgacccagcatattcccagctatggtgcctacagtgaaatactactaatgtttcagaaaagcagagggaaaaataaagggaactttgtcttgcatcctatgtaccagctcggctacatgggggtagagcaataagctggctcttggggtcccaaagtccaggcttaggctcttggacagcatttccagatgtgctttgggacagaggggagctcactgacctaaagagcgagtctcaggcctggcagcattcatcacaagctgacagaagagcccctaggctctcagtaaacatcagtggtggcctgaaggaatcccctgtggaccggtggtgggggtggccacagggaaaggcagctctgcctgtggaaagtgaagagtaggaaagactttgtattgtggtttgagtgcaggcataatgacagtagaatagaatatcaggaaaattgctaagctgtttaactccagtccctggctcccagacagcactttggacattcccggagcctgtgggaactcacggccctgaagggaagaaactggggcaagacctagtgctgtgcaggtttcaggtctaacccagtgcagccctagtggtggtggccacagacttacttgcatcaccacacccccagttgcaggtggctcagcaaagagagacagaccctgtttgtatgggagaaagggaaaagaacaagagcctctggctggtaatccagataattcttccacatcttatctaagaccaccaaaatggtacctctacgagtcagcaaaaaacacagccttattggggttggggtccaagtcctttcaaatacctggaaagccttcccaaggacaacagtcacaaacaagcccagactgtgaagactacaataaatacctaactcttcaatgctcatacactgaagaacattagcaagtataaacatcatccatgaaaacatgacctcaccaatgaactaaataaggcaccaggaaccaattctgacgaaacagagacatatgacaactaagatagttaattcaaaatagctgttttgaggcaactcaaagaaattcaagataacacagagaagaaattcagaattttatcagataaatttaacaaaaggattaaattttttttttaaatcaagcagaatgagtagggaggtggagtttacagtgagttgatatcccaccactgcactgcagcctgggtgatagagccagaccctgtctcaaaaaataaaataaaataaatttaaatatatgtatatatatacatatatatatgtatatatatacacacacacacacacacatacatatagcagaaattctataattgaaaaatgcaataacatgctgaagaatgcatcagagtcatcagagtctcttaatagcagaactgatcaagaaggaagtagtgagcttgaagacaggctatttgaaaatacatagaggagagaaaaaggaataagaaaaaatgaagcatgcctacaaaatcagaaaacagcttcaaaggggcaaatctaagagttaatagctttaaagaagaggtagataaaaagagaggggtagaaagtctattcaaaagaataatcagagaactttcccaaccttgagaaagatatcaaattcaagtaaaagaagcttatagaacagcaagcagaaagaagattacctctgggcatctaataatctaaaggtcaagaataaagaaaggatcctaaatgcagcaagagaaaagaaatcacatacaatggtgcttcaatacatctggcagcagacttttcagcggaaaccttacaggccacaagagtggcaagacatatttaaagtgctgaaagaaaaacacttttactctagaatagtatatccagtgaaaatatcctttaagcatgaaggagataaaaagactttcccagtcaaacaaacgctaaaggatttcatcaacaccaggcgtgtcctaaaagaaatgctaaagggagctctacaatctgaaagacaaggatgttcatgagcaagaagaaaccatctgaaggtacaaatctcactggtaatagtaagcacacagaaaagcacaggatagtattacattgtaattggagtgtataaataaaccaagtagaaagactaaataatgaaccaatgaataataactacaaaaacttttccagacatagatagtacagtgagataaaaagaaaaacaacagaaagtttaaaactagagagacaaagttacagcatagagtttttattaggttcctttttgtgtgtttgtttctttatgcaatcagtgtgaagtgaagttgccattagttttacataacaggttataagattgtgttggcaagccttgtaataacctcaaactgaaacaaataaaatgggtacacaaaatataaaaagcaagaaattaaatcataccaccagagaaaaccaccttcactacaaggaagacaaggaaagaaaaaaggaagagaagtctgcaaaacaaccagaaagcaaataacaaaatggcagtagtaagtctctacttatcaataataacattaaatgtaaatggactaaactctccaatcaaaagaaataaagtggctgaatgaattaaaaaacaagacctaatgatctgttgcttgtaagaaacacacttcacctataaagttacacatagactgaagataaagagacgaaaacagatattccaagtcagtgaaacaaaacagagcaggagtagttacatttaatcagataaaatagatttcaagacaaaaattgtaaaaagagacaaagacggtcattatatagtgataaaggggtcaatccagcaagaggatataacgattgtaaataaatatgcactgtattagtccgttttcacactgctataaagaactacccaagactgggtaatttataaaggaaagaggtttaattgactcacagatccatgtggttgggaggcctcaggaaacttacaatcatggtcgaaggggaaactggcaccttcttcacaagttggcaggaaagagaagagtgaaggaggaatttccaaacacttataaaatcatcagatctcatgagaactcactattacgagaacatcatggaagaaactgccccccagtgatccaatcacttgcctcccttgacacatggggatcataggtccctccctcaacacgtggggattacaattcaagatgagatttggatggggacacagagccaaaccatatcatgcacccaacactggagcaactaaatatataaggaaaatattatgagaactaatgagagagatagactccaatacaataatagctagacacatcaaaatatcccactttcagcattgggcagatctcacggacaaaaaaaaaaaaatcaaaaaagaaacagcagacttcatctgtactacagaacaagtggatctaaagttatttacagaacatttcgttgtttttttttttttttttttttttgagatggagtcttgctctgtcacccaggctggagtgcagtggcatgattctcagctcaccgcaacctccatcttccacgttcaagcaattctcctacctcagcctcctgagcagctgggattacaggtgcatgccaccacactcagctaatttttgtatttttagtagagacggggtttcgccatgttggccaggctggtctcaaactcctgacctcaggtgatccacctgcctcagcctcccaaagtgctgggattacaggtgtgacccaccacgcccagccagatatttacagaacattgcatccagtagctacagaatacacattcttctcctcagcacatgggtcattctcaggaacagaccatacgttaggtcacaaaacaagtcttaaaacactcaaaaaacctgaaatatcaagcatcttctctgaccacaatgaaatataactacaaatcaataataacaggaatattaaaaactatacaaatatattgaaattaaacaatatgttcctgaatcaccagtgtaatgatgaagaaattaagaataaaattgaaaaacttcttcaaacaaatgataataaaaacacaacatactaaagcatacaggatacagcaaaagcactattaagaagagaatttatagctataaatgcccgtgtcaaaaaaaaagaaaatcttcaaataaataacctaataatgcatcttaaagaactagaaaagtaacagtaaactgaactcaaaattagtagaagaaaagaaatacttaagttcagagcagaaataaatgaatttgaaatgaagaaaacaatacagaagagtgattaaacaaaaagttggcttcttgaaaagataaacaaaattggcaaccttttagtgagactaagaaaaagagaagatccaaacaaatgatatcagatatgaaaagggagacattacaactgatacggtagaaattcaaaggatcattagtggctactatgagcaactatatgtcaataaatttggaaaatctagaagaaatggatcaattcctagatacataaacctaccaagattgaaccattaagaaatctaaaacctaacagaccaataacaagtgacaagagtgaagccttaataaaaagtatcccagtaaagaaaagcctggggccagatggcttcactgaattctaccaaacattttaagaactaataccaatcctactctaagtattccaaaaaatagaggagggaagaattccacactaattctacaaggccaatattaccctgataccaaaatcaaagacatattaaaaaaagaaaactataggccaatctcactggtgaatattgatgcaaaaatcctcaagaaaatactagcaagctgaatttaaaaatacattaaaaaggtcattaatcatgaccaagtgggatttatcctaggggtggaaggatggttcaatgtatgcaaatcaatcaatcaatgtgatacatgatatcaacagaatgaaggataaaaaaatgatcatttcaattgatgctgaaaaagcatctgataaagtacaacatccgttcatgataaaaaccctcaaaaaaaaaaaacgtgatacaaatggaatatgccttaacataataagccatatatgacagacccacaaccagtatcatactgaatggagaaaactgaaagcatttcctctaagatctggaacatgacaagaacatgtactttcaccactattattcaacatagaactggaagccttagctagagtaatccaacaagagaaggagataaagagcatttaaattggaaaggagtaagtcaaattatctttatttgcagatgatgtgatcttatttttagaaaaacctagaatccaccaaaaaactataagaactgataaacaaattcagtaaagttgcagtatacaaaaaccaacatacaaaaatgagtagtggccagacatgatggctcatgtctataatcccagcactttgtgaagataaggaggtggactgcttgagcccaggagttcgagaccagctgggcaacatggtaaaaccctgcctctataaaaaacacaaaaattagccggacatagtggcacatgcctgtagtgacagctactcaggatactgaggtgggcagactgagcccagaagctcaaggctgcagtgagccatgactgtcactgcaacccagcctgggtgacaaagtgagatcccatctcaagcaatcaatcaatatcagtagcatatctatatgccaacagtgaacaatctgaacatgaattcaaaaaagtaatcccatttacaatagaaacatacaaaattaaatacctagaaataaattttacaaaagtggtgaaagatctctataataaaaactataaatcactgataaaagaaattgaagagaatataaaaaaatggaaggatattctatgtttatggattggaaaatcaatactgttaaaatatccatattaaacaaagtaatctacagattcaatgcaatctctatcaaaatactaatgacattcttcaaagaaataaaacaaaaccctaaaatttatgtggaatcacaagagactcaaaatagccaaagctatcctgagcaaaaagaataaaactggaggaatcagattatctgacttcaaattatattactgagttatagtaaccaaaacagaatggtattagaataaaaacagacacataaaccaatggaacaaaaagaggacccagaaacaaatccacacagctacaggaaatgaattttcaacaaaggtgccaagaacaaacattggagaaaagacactctcttcaatatatggcactgggaaagctagttatccatatgcagaagaatgaaccttgatccctacacctcacaccttatgtaaaaatcaaatcaaaatagattaaagacttaaatctaagacttcaaactgtgaaactactacaaaaaaaactgaggaaactctccaggacattggtctgagcaaaaatttcttcagtaataccccatagtcacaagcaaccaaagcaaaaatgaataaatgggatgatatcaagttaaaaagctactgcagagcaaaggaaacagtcaacaaagtgaagagacaacccatagaatggaagaaaatatttgcaaagctacccatctgacaagagattaataagcagaatatgtaaataactcaaacaactgtataggaaaaagtaataatccaatttaaaaatgggcaaaatatttgaatagacgtttctcaacagaagacatataaatggcaaacaggcacatgaaaaggtgttcaggccgggtgcagtggctcatgtctgtaatgccagaactttgggaggccaaagcaggcagatcaattgaggccaggagtttgggaccagcctggccaacatggtaaaatcccatctctactaaaaatacaaaaattagctaggcatgatggcacaggcctttaatcccagctacttgggtggctgagccatgagaatcccctgaaccagggaggtggaggttgcagtgagccaagatcgcatcactgcactccagcctgcgtgacagagtgaggctctgaaaaaaaaaaaaaaaaagaaagaaaagaaaagagaaaagaaagaaaaagtgttcaagggccaggcactgtgactcacacctgtaatctcagcactttgggaggctgatgaaggcagatcacttgaggccaggagttcaagaccagcctgaccaacacagcgaaaccccatctctactacaaatagaaaaattagccgggtgtggtggcacaggcctgtaatcccagctacttgggtggctgagtcatgagaatcgcctgaaccagggcagtggaggttgcagtgagccaagatcatgtcactgtacttcagcctgggcaacatagcaagactctgtctcaaaaaacaaaacaaaacaaaagatgctcaaaatcattgatcatcacagaaatgcaaatcaaaagtaccatgagatatcatctcactcgagttaaaatggcttgtatccaaaagtcaggtaataacaaacgctgtcgaggatgtggagaaaaaggaacccacatacactattggtggagtgtaaattagtaaaaaccaccatgagaacagtctggaggtccctcagaaaactaaaatagagctaccgtatgatccagcaatcccactgctaggtatatatccaaaagaaaggaaatcagtatattgaagatatatctgtactctcatgtttgttgcagcactgtttacaatggctaagatttagaagcaacctatatgtccagcaaaagatgaatggataaagaaaatgtggtacttacacacaatggagtactagtcagccataaaaaggaatgagattctttcccatttgcaacaacatggatgaaaatggagatcattatgttaagtgaaataagctatgcgcagaaagacaaacatcgcatgttctcacttatttgtgggatctaaaaatcaaaacaattgaacttgttcagttgaactctgaacaattgaactctgagttcaaaacagttttactcagagagacagtagaaggatggttaccagaggctaggaagggtagtgagggtgtcacgggtaggtgacgatgatctataggtataaaaaaaacagaacaaatgagtaagatctaatatttgatagcacaacaggagacaatagtcaataataatttaattgtgcattttaaagcaactaaaatggtgtatctggattgtttgtaacccaaaggataaatacttgaagagatggatacccaatattccatgatgtgattattatgcactgcattcctgtaccaaaatatctcatgtactacataaatatatatacctactatgtacccacaaatattacaacgaaaagaaataataaaaaatcaatgacataattacactgaaaataattaactaaaatggcttggtggaattctatgtcaaaactcatgtttaaaaactgaagccatcaacctcttaattttttcataatttattaaccttctattctttcagaaaataattttcctttacttaaagaaacatttccttgttttttccataattattattttgctaaattttatacaatactgcaataaatagccatgtatacctatctttaaatactattatttttaattcctaacagatatattcacaaaaataggattactcggtaaatgggtatttgcatgtttgtgagtgtcaatgtaattttttaatagctatgactatactgctttcccttaagactaaaaatgtactttctgttaacaatacaaaagaacagcattgcccatttcatctctcttattcacttcaacagtacgttatcattctttttactgtctctcaaccgaagaacggaaaattgatagataataatttatctaatttacataggaatccttttcatatgtttactggtcacttttaggttcttttgtgaatttcttattgatatcatctgagtttctgtctattgggttgtttttcttataagaattattagtacagtgaatatattaatcatttatcagtcataggcattatgtttttccaagttgttgatggtatctttcctccacttaatgttataggtagtaatagatgtctacttttttatttctactttctaaatatcctacattttggttatcaaattcacacatatgcccaagttctacttttacagttttccaaatatgtttctgaagtatttatcatgtcatcttcctccctattgcttatttcatctggaagaattttaatatatgctgtctttttagtgatgttttaatttctggagaggcaagtatatcccattactttttcacaaattgtaggactacattaaagcatttattttcccacattaactgaatatttaaatatccaaatataatagttgtgtcttaaatttgttataaagaatatttaaatgtcaaatcaactctactgttattttaatggagtgctttactaatggatattgcactgagtttacatactgacttgagaaaaatgaacatttttgtgacgtaaaattttctctctttggctataaaagacagtgtggagtcttttttccagttggaaaactggaaaaatacaagtaatgttggtatattaagtaacagcatcctgccaatgttaattttctgattttgataactgtaccagattaagacagagaatgtgcttaggaaatttccactgaagtattttgaggtagaagggaatcctgactttaacttactctcaaaattcagaaaaacaaagcataaagagaaagagaataaatgtcgtaaaaatttaacaatcacaagatctgggagaacagtgaataggagttcctgctttattcttacaactttcctgaaagcctcaaattatttcaaaacaaaagactgattctgtctctctctctctctctctctcacacacacacacacacacacacctcaagaccccaagacagactatccagcatggaattagtttatattttatcttatttgctttaataaaattttgtagcttcattccaaagagcatgtgtacttttcttgcagaatttggcccaaaacattgtttttgtcatatttatgaatacactgtatttctgatttccattcttagctggttactgactgtcaaagaaaagctattaattttttgcataactatctcatacctaataacctcaccaaattctcttattaactctggtagaaaaatgttcaagatccaggtacacctcaggacacaggaattagattttcctagaccacagcattagaaatttgaaagtaatcttctttctttctttactagcatttatattagctgtatcttgcacttgcaagaacatcaaaaaatatgttaacaacagtgacagtaggtatcactcatttttcctgattttaaaagagatgactttaatcatttaaaatgatatttaatagtctttaccatatttgtattgttttcttatataaatctttttctgtgagttttaatacggctggcagctaacaatcatcatatgctttttttctacctttactgatatcttcgtgttttttctatttttaatttgttgatataatttattttgcaggtagatatcctaaagtaaacaattttgtaattccagtaaaaattttcagtcatcatactatataattcattctttatattgatgaattatgttatttaaagttatagtttaaattttgtacttatattcttaagtgaaattggtcttctagagttttatttttctagaataattttcagatttgctggttgtataaaattcacttggaagatttttcatcttttctaatgtaccagaaaaatgtcagcaacatatgagtttatctgttcttgatatgttagaagccatacagtgcttttaaatatttttccaattctatagcaaatgtactacttgtcaaattttctagttcaccttaggtgaatttgggtcatttctatagctacaaaaccattaatttcctctagaaatttgtatttcttatacatgttcaggcacaactactgagataagcaatggtcccaggatgagtttatcacttagtcctctcctatgagaatccaaggagagaggtgtgtgctccctcatttcctcagctacaaatactgttacgctctcaaaccctaaagacagagaaatttcacacccctgtgttcagctcctctctagaaacctggatgatcttacctttgccatagagattttcatttctggctaactagctctgttttgtccagaaagggccaactccttcaccagttttctttataggaaaaccatcagagccaagatttacctctgattattaagattagagcagccaaacaagaagcttctctgatcaagcttctgtggtagctcaactacaattgagacaagagggctaaagagacatgtactatctcccagaacccccatgactctcctataaacctagattttaattttttgatgacatatactatgtttctttggacctgccattttaccgggacaatttctcatgattatcattaaaaaacggtaacttccgcacaccaaccatatgtgtaacctacctcaaattccgcatgtctgtgaatatcttctgctctctgcctgctcaggataaattcagcttcatttgctactcttactagatgatccttcattgtctggctaagcaacctgtaagaaatgaatgttatcaaataaatatatgtatacacacacaacataaatgattattcactgcttacggtggagaggaaggaatacttactttcttcttttgacatcatacacaatgaggtaccattatttcatgctaaataattgaggaatgtaacaacagcaaaaggttacccttctggcaatagcagattagcttctatcagactagccatgtaacaaaagcaactaaaaatactggattaaagttgtgttttaatcttttaaaatgcactggaaagttaccaaggcagccaaaattaaccagtgaagatcacagagaagaaagcacacaaaggacaatcagtgtgactttttacattaaggcatttgctattcccaagtgagaacagaaaagctacacagacctgtcactagtctcacaaagataaatagaaaaaaattgaggttcacagtctgtcaaggtggaggagtcccggtagactacccaagagttacagcaggaatcaagtgtaccccagaaagcaagaaatagaccaggcctcaaaacactgaaacagaccttcagagatttggtgattggtatttaggttaactggcagccaaaaagctaagcaaagctttcagggtggggagaaaaaaatcagaaataccaatgcaggagggccatggcaaaaccccaggttttcagagtacctcagaagggctacacactaggagaaggcaaacaaaataggccaaactctcacaagaacttaaaaataaaaacccagccttgagtcagctcagaccctaaattaatacaatcggccattagtctaactgctaatcagaaaccaaaaggaagtcctttctaaaggaagataatatcatagagacttaaatttacccttgccattttaaaatacaattttcagcattcagtcaccaattaataggcacaagagacaatatcatacgaatggaaactaaatagaaactggctcacatctggacattgaaataaatatagttaatatgtttagaactaattgtgtaacagagaattccagtaaagaatgaaaactgtagaagaactgaaaaaaaataaataaatataaaaatagatttactgggttattaagctcagccaaaaaaggaaaaatttactgaaagataggtcaatgacaactagactgaaacatagtaagaaaaattaatgaaaattgaacaaaataaataacagacatataggacatggtaaaagaatctaatgtaagtgtatctgtagtataagaaagagtagatacataattagaaaaaagcaatatttgaagagataatggccaagatttttcaaaactgggaaaaaacactgagccatatgttgatggagtgctacaaaacccaagcagggtttttaaggataccctgcttaggcagtaatagtaaaactatcaaagaaaaaaattcttaatagcagacagcgggagaggccttcaaaagagcaacaataagcctaatggaagccagataagaatgcaatgacctatttgaaatactaaacaaaaatactacctaaaaggccaggccagtggctcacacctgtaatcccagcactttgggaggtccgggcgagaggatcacatgaggccagtagttcaagaccagccttggcaatgtagtgagatcccatctctaccaagaaagttttttttaattagcgaggcatggtagtgcatgcctatggtcccagctactcaggagcctgaggcagaagcatcacttgagtcaatgagtttcaagttatagtgagctatgatcacaccatggcacttcagcctgagcaacagagagagatcctctctcaaaaccaaccaaccaaccacctaagaattctatcctcttcaagaccagcctgggtaacatagtgaaaccctgtctctactaaaaatataaaaattagccaggcatgatggcaggtgcctataatcccagatactagggaggctgaggtggaagaatggcttgaacttgggtggcggagcttgcagtgagcccagattgcaccattgcgctccagcctgggtgacagagcgagactccgacagaacgaatgaacaaacgaatgaacgaacgaaggaaaaagagagagagagaaaggaaagaaaagaaaaaagaaaagaaaagaaagacgaaagaaagagagagagaaagaaaagcattctatcctcagtaagtatccttcaataatgagatttaaagggtcaagagtataccactgtgggaaaaaaaaaagagtatttttctgaactttctttatccacctaaatgaagaagctcccaaaagaatttagctttcatcaatcccttcccagggagttttgcaaccaaggaagattgactattgtcagtaaagatgagaagttagtaccaggatgagaaattatctaaatagacattgatacaaaactataatatcacttaactattctcctaagggcccacttactgttcacaaaatcattagctttcccaaatgtgcccttcattacttcacttttaccctattaaaatggtatgtatataaccccaaattctaaccccctcctcaagtcacatttttctctgaatcttttttttttttttttttttttttctgagacgaagtttcgctctgtcgcccaggctgggtataatggcacaatctcgggtcactgcaacctctgcctcctgggttcaagcgattctcctgcctcaacctcctgagtagctgggattacaagtattcacaatcatgccaggctaatttttgtatttttagtagagacggggtttcaccatgttagccagggtggtcttgaactcctgacctcaggtgatccgcccgccttggcctcccaaagtgctgggatttcaggtgtgagacacagcagccggccgaattctgacagacttatgactaaaaataggtcttttttcttgctaagctgtgtttgtctgtttaattcacaggtccccaaacaacaaacctaagagggtagaggaaaacttttcctcatcatcaaaagcaaaataagaacattccatgacaaataaaatagtgagaatttgtcaccagccaaccaacatacttcacaaggatgaaaaataatataagattgatacaagtcaaggaaaacaattggagcaatgaaaatgacaaacgtgggtaaatctaaaagtatactgaatgtttacaataattatgtaacttctagaattaaaaaatactgcaatctaaaatatataaccacagcatacaaggcaagagaaaccaactgaattagtgttataagtttcttgtgtcatacatcaattggcaaaagaatcagtttatgtaagatgttaattataatattcatactacaatctctgggtaaccactaaagttatttaaaataatatataaccaacaagccaatgggaaaaaaattaagcaacaaatacttagctcagaagaaggaaaaaaaaaagaaacacaagatgtggagcaaatataaaggacataaataataagatgataaattttaacctaaacatatcagaaatacatagaaagtaaacatttagtagtaaaattattgtcaaatcaattttttaaggcatatgatgcttgtaagtgacacaatttcaatataaggttaaacaaagattgaaaagtataatttcagaaaacatgaacaatttttaaaagctaaaaggtaataaactttttttagtatgagaagcaaacagaaataaaataaacctgttaaattaataaaaggataaatgaactagagatacagaaatttagtattttgagattctaaatttgtatgctcttaagaatatggcctactaccagatatagaatatataaagctatagaatattttttaacctgacctgactgacatatcgagaacattatacccagtaagtgaataataaatattattttcaggtaaacatggaacatattaaaaaaaacaggcaaaatgcggggtcacaaagcaatttacagtgaatttcaaatgatggaatcatactcagtatgttctttgatacatttcaattaaactagaaataacaggatacagatcactctgcaagaagctctaagctgaccactgactttcctaacctcctggtatccacagcattatgtaatcttcccctttagagtgtaagaaggagatggggcttgcctcgaagcaagaaaatatggcaacaatgaaggaataacacttcaataattacattaaataagatggtaacttgcatcttgctagcagactctattgacgctctcccttaatggcttagctaaagaaagctgtcatgttatgagctgccctgtgtaaaggcctccatggcaaggagctgagtagagccccagacaacagcccgcaaagaattcagactctcagtctaacgactcaaaaggaagtgaatcctgccaacaatcacatgatcatggaagcagatcctttcctagtcaaacatcaaataagactgcaactctggccagcacctcaattgcagccttgtaagtgaacctgaaggagaggcccagctaagccatgcctaggattcctgaccaagaaaaattgagataacaaatgtatgtttctttaaggctaagttgtgataatattgttaacacagcagtcgctaagtaatatcatttcatgtctaaaaattaaagaatgcacctctgaaaaaaacgcacacataaaagaatacatcataatggaaattaggaaacgtttgcagtaaaacatagtaaaaacaatgtgccaaaatctgtggatttagataaaccttaaaccaatgcttagagggaaattgatacactgaataaaaacactaaagaagaaaaaaattgtcaaaataaattatgcaagtattgaactgaagaaatcagaaaaagaacagccagtgaacactgaaagttaaataaggataagaacagaaattaaatagaaaataaaaaatacactttagaagataaagttaacagttagttatttgaaatactgaaaaaatccaaaagaaaaatgtaaacaattaaaagtaataattgaatttaggagggtcactggatttaaggcaaatacacaaaaatcaactagattatatgtataggttactaacaaagtaaaaatggtttttaaatactattttgaaaagcattcaaaaccatcaaaatatgtaggaaaaagaaacaaaaatgtgctagaattctgcatgtcaaacagaaagaatggtaaaaaaaaaaaaaaaagttaaaacttaaagaaaaaagtataccatgttcatgaaagggaaaggcttgtattaaagatatcaattctccacaaagctatttatagatacagtccaatcaaaatcctagcaggtctttctgcataatctgatgagttcaaatttaattctaaaatctatagaaaatgtaaacaaacaagaatacatgagacattcttaaagaggggaagagagatgataataatgataatgatattaaaagacttataagtaagatggtcttttccaaaaactggtcttagatcaatcaactgatgctcatatggacaaattaaccctgacttctacctcaaaccatacaaacaaaccaattccaaatgaatcctagacaagacctaaagatttcaggaagtttaaaaagtttctagaagattacataagagagcatcttcctgactgggtcgatgtaaagacttactgcaccaaacaaaaatacacaaaacataagaaaaatagtgacaaaatgaactacatcaaaatttaaagacttgtgcttatgaaagccaccactaagagaattaaaagccaaacttcagagagagagaatatacttggaaaaattacaaccaacgaggaactgctatcttaaatatattaaaaagcctcttacaaataaaagaaaatgatcacaatttttaaaatgggaaaagtacacaagcacttcacaaaagaagatttccaaatggtgaataagattatgaaaagttgttcaggattactagtcatcaaggaaataaaacttaaaaccataagatatactatactccacagaatggctatatatgtttaaaaggctggcatcaccaagttatatcaaagatgtgaagtaacagggactcttataatcacaaaatcgattaataaaaatgttcatggcaattatttacaatagccaaacactagcaactacccaaatgtccattaaaaataaaactaatttttaaaatgttggactttcataaagtaaaatgctaagtaggaaaaaaaagaatcaatattatgcataacaatatgaatttcactaacaatatgaatttcactaacaatattgagcaaaagcacacaaaaaatataaaatgtatgaattgccttgtataaagataaaaatttttaaaaacaaaactatggtattagaagttaagagattaagaaatggtaaccttcagtgctacctctccatatgaggactcacacggaacactgataatggccacggagttctaaatattttaataaaatgtcttagatgtataaacaaacgacccattctgattagcgcttttataacaccatttacttataaacatatcaacagaatgattcactttatgtaatctggaacatttttgatatgtataggtcttctaaacttccttctttaataggagttgagaacatagagcgggcagggatagaattattattattatcattattattattattattattttttttttttagggacagagtctcgctctgtcacccaggctggagtgcagtggtgcaattatggctcacagaaacctcaacctcccaagctcaagtgatctgcctacctcagcctgctgagtagctgggactatatacatgtgccatcgtaccctgtaagttattttggtggtgttgtagagacagggtctcactatgttgcctatattggtctcaaactcctgagctcaagtgatcctcctgccttagcttcccaaagtgctgaaattatgggcatgaacatacatggcctgcaaggattatttttttaaatttatataacaaaagtggctaaactgccactagaaaatgcccacctacaaaagttacacctagcagtcatcaacaatgacatgaacttactcccattccacagggcacttgcctcactttgtagcaatgttttcatttaaaatataaataaggccaggtacagtggctcatgcctacaatcccagcacgtagaaaagagactccttgagccccaggagtttgagacaagcctgggtaaaataaagagacttcttctctacaaaaaaacaccaaaaacaacaaaattagctgagcatggtggtacacatctgtagtctcagctactcaaaaggccaaggcaggagaatcacctaagcccaggaggtagaggctacagtgaaccatgatggcatcactgcactgcagccagggcgacaaagtaagaacctgtctcaaaacaaaaaacaaaacaaaaacaaaaaaagagcaaacataaacttggatccaaagcaattgtcacaaaaattgtttttatttttttggagatagagtctcactctgttgcccaggctagagtacagtgacaggatctcagctcactgcaacctccgctccctgggtacaagtgattatcatgtctcagcctcccaagtagctggaattacaggtacatgagtcaccacccccggctaatttttgtatttttagtagaggtggggtttcaccatgttggccaggctggtcttgaattcctgacctaaagtgatccacttgctttggccttccagggtgctgggattacaggcgtgagccaccgcgcctggccagcagtcttaataatgcgctatatgaacatgttcccacaatgcagaaaaacatgtggaaaatattcctcatgaatcaattaatttcactacaacactatttatgaaagtgagaatcttaaagaatcaaaatatacaatcatataagtagattgttccaaattgacaaaataatgtccacaatatacattaagaggaaaaataaacctgaggaatattatgaacaatatgagcttggggaacatataaaagaaaatacactttcttttaattgccaataatctagaacaggggtcagcaaattaaggcctgtgtgccaaatctagcctgccaacattttttggttagtaagttctataagagcacaactaggcccatttgtttaagtgttatccatggctgttttcaactcaccatactacactgagttgaccagttgtgaaaaagaccatgtgtactgcaaggcctaaagaactatctggccttttacagaaaaagcatgcacatgtctgggctagtgagtgaggcttaagtcctcctccttacatgtctctgttctttgaagctttacaacaatcaataatcaaaagaaaggaaaacagaaaatccttaaagaaaataaaaaagctttctgccattctatcactttgtttcgatctctattaggctcacatacactattttaatttgactccagctctgtcagactctctcttctatccccaaactgtcttccagctactttagaagttaatgcaatttcttatctatgattttggggtgacatcatcagggtattttttttcaaatgctattaaacagtactcatttaggcattacagacaaaaaccatccctagtgtaattttaaaacccactaatgaataacttcctctgattctacgatagaaaaaacaagggctttcaagagtacagatgtgaaatactggtttgggttcttaatttccctctagagacctaaaaccacattgtgaatttaacatcaatatattgccttgtactttcaaacattaattgaattgattagtcaatggcacactatcctactagtccccaaacaagtaacctcaaagttattctagtctcttccctcttctctaccaccttccttcaggcccctaatcaatcaataagtcttgtcaatatttcctttgtaatattctcagctttaatttatgctgttttatagccaatgtcctaaaaataaaggtttcatcatttcatatacattataactgaataaatcttctgagtgctaattctgatcttttaacatttttgtgcctctgccttttaaaaacactgtccaacatctgttcaacacctattacattatagactaggctaagcagcaaagatgacctttcattatattttagttggggaaaaagagaatccactggagtcctttccagcttgaaactcatattaacataagtgctatggtggacacaccctaatgtgacctccagtgagtcgtggctttaaatgatcccaaccccttgagttcaacctgggcagaatctggcacttccttctagcaaacagaatatagtaaagataatgggataatcattccttaattagggtactttacatgccaacggtgatgggataatcactctggtacttatgtaataaagttctgccctagcatactgcagagattctcctgccacccctgaagaagaagtaagtggctatgtgtgaccaggccatgagacagggaagtatggacagcctgtaggatctgagagcatcctctcagtgacagtaaacaagaaaatgggaaactcagtaccacaacagcatggaactgaattctgccaagaaatttgtgaccccaagctccagaaagaaatgcagtttgaccaacacctttattgtagacttgtaaaaccctaaacagaagatccagctaagctgagtctagacttctgacccacagaaactgtaggatagtaaacataagttgctttgagctgcaaaatttgtgggaatttgttataaaataagcaatacaaataaaattagaacataagaatatgtttgctatcatatctctatagaagcaaagatcacaataatctactaaagatgaaaaaaagctccaatagaaaattagagcatgaagatgagccttaaagggcaaaagcaacaaaaagagaaagatacttcagataacagtatgaacaaagttataaagagaaaaaaacctttgttttttgttttttgtttttgttttggagatggagtcttactctgtcgcccaggctggagtgcagtggcacgatctcagctcactgcaacctctggctccctggttcaagcaattctcctgcctcagcctcctgagtagctgggattacaggcacgcaccaccacgcccagctaatttttgtatctttagtagagacgggatttcactatgttggccaggatgttctcgatctcctgatctcatgatctgcccgccttggcctcccaaagtgctgggattacaggcgtcagccactgcgcccagccgagaaaaaatcttgtgtgttctattttcaagagaaccgaaacatccctttctatcacttagttttcaagatgtccatttactgacatatacacttagataggtaggatatttctgtcttgatgtttcactcatttttctggttacatagcatttaaaaaccatgcaacactttaataatgaagcaacaagtgaaagctcccagcccccttccctgttcacttttcagaatacatcaccaccatgagtagtttatgttcctgtccttacatttatctaaacttatagaaacatatacagtatttatgtgcatatatatgaaacacatacagtatttatgtgcatatatacatatatacaaatgtacatgttcatgtgttttgtaaaaatatttttaaatacttaagaagtcatactataatacttgtatattttacttaaccgtataccattatgtaatcagaacagcttcaagtgactcatgtggatggaatgtaccgtaatttatcaaaatagtcccttatccagagatcattcattctttcattctttgccccattaacataaccattatttatccagttactgaagctagaaatatcagtcatatcttccttcttcatcatcctacagatccaatagaccaagtactgcccattctacctctgcaataactttaaaagttgtttctcttactttttttttttttttttttgtgagacagagtctcgctccatcgcccaggctggagtacagtggcatgatctcggttcactgcaatgtccgtctccctggttcaagtgattctcctgcctcagcctccagagtagctgggactaccagagcccaccaccatgcccggctaattttttatatttttagtacagacagggtttcaccgtgttagccaggatggtcttgatttcctgaccttgtgatccgcccacctcagcctcccaaagtgctgggattataggtgtgagccactacgcccggccaaaagttgtttttctttgtaaccttttccggtgcccttcactggaaactcactggaactcaggatcatgtctttgattatgataatagcctccaatccaacttctttccatgagtcttactattcttgcccattcttcactgggatcatctttctaaaatgaaaatctgataatcactgtattgttgacaaggtatcagccgtcagccatcttcccatgatctacaaaagagactaaacacctttccatggcttataaatcagtctcattgttgttaaacttttatactctaagaactccaggtcaggaactactctctcaaacattacaccctgttactgtacactcctttgcctctgttgctactgtcccaggaatgacctcacttcatattctatctaacctaccttcaaagctaaaccaaagtaaaggttcactacagaaccttttctgatcccacacctgctttccctccacagaagtaatcccctaccaacgtgtatcagtctcttctttagtacttattactttgaaactttctgtataacacaatttcaattatgtatttacaaatctgtcttccatttgacactgcaccaaccatttataatttatctttacacaaccaaagcatagaacagtgcctggggacccagcagtgcttataaggaaaagaaactttgactatccacttctgccagtcacttctaagctgctaactgtaaggaatacaaacatgcataacactgtccacaaagagttcacaatctaatatggaaagttataggactatatacaaacagcaagataactgtgaaaaggttcttaaggttcttaaaacattttcttctcttaacttttgcaataatacatagcactttcttggttttcctcctatctagctgctgcttcttcattgcccactttgctacatcctccgctgcactacctacaaatcttgtaatgtccaagagctcagctgtgtgttctttcctccctctaaattatttcatccagttctatgacttttaatctcacctacatagtactaattcctgtgtttatatctctaaccctatccttggtctcctatatttcagactcacagggccaactgtccaactaaaatcttcacgtggatacccaataaggcatttcaaatctaacatttccagagcagaactcttgattctacctactcactgccaataatacctcttccccatcactacctcagtttgtcccaccacaataaatagcgccaaagtccactcaaactcaagaaataatctttgattttgtcatttcctcacctccaaatcccattcatgaaagcaagttctactgctttaactattaaatacatcacatatatgtttatttctctccatcatcattgctaccacatcattctaagtcaccattccctcttttctagaatacttcagtaatatcttcactgacttatctgctttcattcttgccctgtataccaatcctatcacaattcattcttctaagaatgtaagccatggtgttgggaaagctggatatcaacatacaaaagaatgaaattgagccaggcgcggtagctcacgcctgtaatcccaacactttgggaggccaaggcaggcagatcacgaggtcaggagttcgagaccagcctggccaacatggtgaaaccccgtctctactaaaactacaaaaactagctgggcatggtggtgggcacctgtaatcccagctactcaggaggctgaggcaggagaatcgcttgaacctgggagacagaggttgcagtgagctgagatcacaccattgcactccagcctgggtgacaaagcaagattccatctcacagaaaaaaaaaaaaaaagaatgaaattggatgcttgttgatatggtttgaatatctgtatcccctccaaaattcttgtagaaacctaatctccaatgcaatagtattaagaggtgaggcctttctgaggtcattaggtcatgagggctccttcctagtgaatgtaattaaggcctttaaagaatagtcttcacacaatgtttagcctcttctgccctttcggcttccaccaggtgaagacacagtgctcaaagtgccatcttagaagcaaagacccagccctcatcacacactgaaacctgccagtgtcttaatcttggacttctaagcctctaaaactatgagaaataaattgctattatttataaattacccagtctcaggtattttttatagcagcatacagagactaaggcacttaccttacatcatatataaaattacctcaaaatggatcaaagacctaaatgtaagagttataactataaaactcctaaaagaaaacataaggaaaagcttcatgaccctgaatttggcaatgatttctaggacgtaataccaaaagcgcaggcaataacagaaaaaaaaaatagataaactggactacatcaaaacttctgggccaggtaaactggctcacacctgtaatcccaacactttgggaggctaaagcaggaggatcgcttgagctcaggaatttaagatcagcctgggcaacatagagagactccacgtctatttttaaaaagataaaggaaaaaacaacaaccttctgtgcatcaaaggacaaacccaacagagtgaaaagacaaccccagtgactcatgcctataattcctgcactttgggaggccaaggcagaagggctgcttgagcccaggagctcaagaccagcctggacaacatagcaagtccctatctctacccaaaaaaaaaataataataatagctgggcatggtggcatgtgcctgtggtcccagctactcaggaggctgaggtgggaggatcacattagctaggagtatgtagctgcaataagccactgcactccagcctgtataacagagagacgctgcctgtctcaaaaacaaaacaaacaaataagcagaaaaaaaaaaccctgtaagttatatcatgccactcgtctattaaaaactctgctcttactgaatatggtttaatccaaatttcttagcatagcttatagggccttatatgatctgaatattgaatacttctcttgacattcccaagccttactctttcttgctgattttgttccagccactctggccttcaatttgtttaaataatacacaatactattcactccttatggcctctgctcttgctgtttccttgccttaaaatgttgtgacatacatctcaaaagggttagctacttctcttcattcaaactgtttccccttcacaagatttttctaaacactccacactccctaaaagccagtatgtttactctcataacattatcctgctttgtttccttctaagcatttattactttctaaattgtcttattttgattacttgtttattatttgttctctcctttatgacagcacagacttattcacagctatatcctcagattccagaatagtacctggcacatggattataatcaataaatggatactgaatgataaaaaatgagtgccataaaccactcccaatctacttttttgtcctttccttatatccaaaaccttaacttccttatatccgtttcaatcctctttccctctaaggaatattctgcaattctatcctataaagacctttactttatgtcaatctttatttttaatatcatttttgtagagacaggggtcttgctatgttgtccaggctggtctcagaaatcctggcctcaaattcccaagtagctaggactacaggtgcatactacccaattttttttaaagagataggatcatgctatgttgctcaggctggtcttgaactcctgggctcaagcaatcctcccatcttagtctcccaaagtgctgggattacaggagtgaactacaatgcccaggttattttatgtcaatcttatccctaatgattactgtaggtacggcatatattatacttgtttatagaatatcttataaacattctattagaattatatgtgtattactctattctctcagaagatgtgcttccttaaccagaactgattaaggaagcagggaaggaaaaaggaaaaatctttaaaaaaaaaaaaaaaggactaaaaaaatcttttgcttctttttattttaataaacataacatctaagaggtactgttcaggtaggctataccccatcattatttgatgagtggacagtttgtaaaaatacttcaaaccaaatattctcaagcatctaaatttatctaagcaattaacagcaacaccatggagcttttagacttaactgtatcataaatttaagtttgaaatatttttgctggataatacaaaatgattaccatctaaccttacttatttaaaagaatattataaaaagtgattgggatgtatgtaaagtatttaataatactttcagagaagaagggaagcatatatatcttttccttcacaatttacaaaatgttttaaaatcaaagtttctgagaaggtcctgaatacatacctctgatttttttaaatattcacacaatgttatttgtcctttcattaatgaaaatattaaaatgacttcaaaaattaaactaataagatatctaaatgatttttttttgctattctaaggggtcaatttttcttatctatatgcctattttcctaaatatgcaaattacacaatatttagcaacagcaattttatctaatagctgtgtaaactattctttcaaaaaagaattaaaggtaaattaaagttttaattattataagcaggctcaaaatgttgggtttactgtagattaaatgtctaaatgcagagcataaaatgattcacatattttaatattaagaagaaaaaactatgtataatttacacctacagtgcaagaaggaagaaaaaatgcttgtgtcagccttaggaaacaaacagccctatcaagtaaccaactagaaaagattcatactggaggctcaataaataacagtaatgatgacaaccatctcccataactacattacagcccattgtccacatctgattatactagtctagaccttgggtaagcacatacacattttcaccaagagttttccaatattactgctctgtttcctgggctttctgtgacccccattagcagcaactgtcattttcactactaaacatgaccactgatgagaaaggaaagttactacttttctacactctaataattgagaatgtggaaataatgttcctgaattggcaatccttctaaatatagtaatttctttagaattagctacagagaagaggataaattgcttccaaagattttcttccataatatgagaactactaaagcctcacttttcaaaatatcatctccatatattaacatagcctttattcttatagtgaagaattattgcctaactctccatgtatctgcctccttgcaacatctatctctctctgtctctcacccagcacatccaataattcagtatcacaaaaatccctaaactgttatctctctgcacctttctcagttaaagctctcagtaacaactttgaataagggatgtaaaggttctaacatcacagaatacacatgcctggaacctcagaaagaatagattttgttggtaactgaaaaaattaatttaaattaaaaaaaaatttttaatgggcttcatacacatttaaggccagtctagatctttctcggttgaaatttagcccaggtagtagccactttttctggaaggcagtatccttgatcagagaccacaaggtatccatatgctttattagactttaaatggagatagcaaatactccataaagttatttcatcctgagaatataaaaccttagtaatttaatataaatgttacatcctcacatcaacctgtttttccaaacttactttgcatgataatccctagttgaacattttaaaacaactcatgatattacagaggctagaatggaagcaaaaagaccaggctgcaagcttttatctgattattttagataaaataatttcttaggactatgaaataatctattctctagaatgtgcaaataaaaagagacagaagatagttacatgtagaaaagcaaaaatatagagaaatggctctcctgactctccacttggaattcagtttatttggaattcagcagatttctctgctgcacagtatctaccaccttctatcttcttataactgcctttgtctcttcattgtcagtgacatttccttggcgattcatagaaattcatcttttcagattccactctgaccactcttatttaacactgcaatgtcctctgtatccgactgtacctattctcctcccctcgttttaactttctcatatcacttatctcctgaacatactatcaactttttaatttctttattgtctaactttaccaattaaaataaaccctattaggcaggcatttctattctgaccattgctaaattcccagagccaagaatatggaccagcacgtggccagtatggattaatatttgctgaacaaagtgaatgacgctattttcattttatttttattttactcttctcaaaggttatgagagttccgtttttcacctatccctaatacacatcccttttttctataatcattcttatttaataaatgatcctacgtacatagatgctgttgtagtttttttaaaatgtgtaaggctatgaaacatctatacaaacataagcatattctacaggcacgctatatccaagccatctttcctaaaagtcacatacatttggtcttggtaaaaaaatgtcaaacagcaaatcctatttagcaaaacatttaaagctctgaaatctagtagaatttagcatttttagggggtgaaaaagcacaattcaaacgcagcaccatttttttacataaatcagaacaaagcaagcttaaaaagtagccacagaccagtgtggtggctcacacctgtaatcccattactttgggagtccaaggtgggaggatcacttgagcaggagttcaagaccagtcttggcaacatggcaaaacaccaactctacaaaatgtacaaaaattagttgtggtgtggtggcgagcacctgtagtcccaggtacttgggaggctgagataaaaggatcacctgagccagggagatcaaggctgcagtgagccttgatattgctactgcactccagcctgggcaacaaagttgagactccatccaaaaaaaaaaaaaagtaaccattgaaaaatcatttaaatataaaatcccatataaagtgcacaaaacaagcctccatattcaaaacctattaaaggaagtatattaatgataagctgagatcaagctataaaattaaaaataaaaaatgacctgaccatgtcagtactttaagccaaaacatatgaataaaataaataagaaacatatgcttatcctaattaaggagagaaaattctaatcttctttgataagccattaaaccttcacaaaatgataaacattaatttaaataatctaatctttaagagcatataagagcatatactttattctaaatcacccagagaaacttctatactaatacaatccaggattgaagtaaacagagataaagacatgagcccaggagctaagcggttgcagcctgggtgacagaacaagaccctgtctcaccaaaaaaaaaaaaaaaaaaaaagagagagagagagataaagtctctgctcaattaatccactgttgatctctgactctaccctaaaaatagcatcatttccaaacaactgtttacaagatgtaattaagcagagcacagtaactcacgcctgtaatcctaccaacttgggggaccaaggtaggaagatcacttgagcctgagcgacaaggcaagaacttatctcttaaaagaaaaaaaaattacaataaaaaaatttaattggagtttttctataaagtatcttcccacatatataattttaaaactgaaaccagaaaaagcacatggctctttaagtaacactcaaggatttccaagtgataatctctacctcaattcaaattttatcttccactgatacagataagaatatattctagccacactgtttacttacgtgcaataaatacctttgtctttttatcaaaggataacccagatctaaaatacaagtgctaatggccaacagggtccaaatgaaatattttctggcctctctccctctctcccttttccctctccacctttccttctagtcattcttcttctcattccaccaacattattagtaatcgtgctattcagagaagtgaagaaaaaggatggagcggctaaatgaatgctcagaaagaagacatgcaatctaagtagatgaattttgaagacagaccagtgtattaatactcgaagcattatgtcttttatgtgggctatttatatatttgtatacaagtctgagttactgctgtaataagcagacactgactggctctagaggatgattaagcaacgtgcccaacagtatgcaggataatctgccctttctgtgctttccaaggatgggagaaaaagaagagtcacagcagcacatctaaaagtaaagttgtaagaggctatgaaagctcttaaaatgtgtttttattaaattaaacacaaaactataattataggttgttttaattatttatatatttaacaaattacaagattcaagatgagaatttaaatcttaaaatttttaccaaatattgtacctttaaactaggtttcatagtctactacttccctgatttttactatcaaacatttaaaaaattagccaataaaactatgccggtttttttatttaaagtataaatgaaatagaaacaatgaggagaaactaatagaaacattaataaaactaggaacaagaatgaaaggaggccaggcacagtggctcatgcctgtaatcccagcactttgggaggctgaatgacttaagtccaggagttcaagactagcctgggcaacatggcaaaaccccatctctacaagaaaaaaaaaaaaattaaaaattagccaggtgtggtgtcctcaacagcagtcccagatacttaggaggctgaggtgagaggatcacttgagccagggaggtcgaggctgaagtgagatgagatggtgcccctgcactctagcctgggcaacagagcaagaccctatctcaaaaaaaaaaaaaagacagaaaactctgatagaggatttgcacttatttttcaaaattctagaggttaagaacaaaaagagtaccacctaaacaaataaaatattcatcattctctctaagacacacaagtcataagacaggagaccaccaacaaatcattacaaatttcacaaaataatgtctcagaacagctgacttgatcactgctacctagaacaacatcaggagcttaaaatgctctaaaaaatatttggagggatcacaagcaagctggcaagaagaaaggaggcaacctagcagccagatctatttctgccagcaaaattaacatcaatactgagatactaaatttttttgcaagtaatatcaccaaaacctctaagaaaataagaataaaaggcaaaataagaacttgaagccctttatttatccaaataagaaaaaacattcaagattcattggcaaagaattgagttgaaaaatgtaagcaacagtgttatggaatgtaattaaatatatctttcaattcaattcaatttcaattaaatacatttgtaaagtgaagaaaaaaataactaagataaagacaaatcgaatacacaaataaatgaatttaggtccaatatacataacaatgtaacctacaccacatctaaatttagtataacactgaatcctcagatttcattcaacagggtcaaagggagtagtaataactgtacattattttctattgatgtggtgctacagcatcacagagactctaaaaggtggctttaatattctttaagttctttaaaactattagtttagagaaagttgtgcctttcaagaataagaaaactcttttagatctttcacttgcacatttaaaaagtaaacagaggtgctgataataatgattcaagatatcataaaacactcataaacaaaattagtattcaggaataacaatgttcttgctcataacttgtgaaaatttaattatttaactgaaatcttttattataagtatatgtatttttttctctttaaagtcatcaaggttgtaacaattacgtcagtgattatcaattattctagctctctaaaataaatttgtttaaaatggagtgttgtttacatgaaaaataccaataattgaactcaaaattaccaaaacaatgtatttaaaaatatcttattaaacaaatgtaagttaaagagaccatcagcaaatcactataaatttcacagagtaacatctcatcgagcagctgccttgatcatagctagaacaacatcagcagtttctaccaaacaacaattacttatgtctgaacttagtaattgatttgctaatgacactctacaagtctgttagaccttatgctgtagtctgtctataaaggtcttcatgttatttacacaaatacgacattaatcaagggcaaaatttatagcagctactctataaatgaggtcaaggcaggtcagacttacataataagaagaaaaaaaggttagtctttgcagtaaaaaggaaaatcattattattattcttcctgcccctgggattaagtctagtagtcaaacactccaaactatttcacaaacacatctactcctatgaaaactcatttaacctcaaggcactaaatatttataaaaggaaagccaaatccactgatttagaaaaataaaccactaaaattttcctttaaaatatattctacactgtaaataaagagagaacgaaaatttccaattttacctccactatttcactaatgaatcttagcttccaccactgtttatttcaaacacgtaaaagataaaggctgagtgttctctataggctaagcactgaagtaaagaagacagtttctaactatgggaagctaaaaaatctcaacagaataagaaaagcaaaggtaaaaaatcagagaaagggtactatgaaaatgataacagatgatataaaaataaattattcaaacaactgtttcaccaaattttcagaaatagcaatagcaggagtattagcatttgtgccagtacctccaagtctcagttccacagaataatacaggtccagtagacacctgtatatgcagtaaagtgtgttacaagagaggaactctgagcttagggcacttgaatcttctgtgacggccagtaggcccgttggtctttggcttggagaaagacattattatactagacagtaaacgatcctgctttgttctaaatgaagacactatttctatattccaaagctgtctgctatataaagatctttgaatgataatgcaaaacaaaggcatttggtatctcttcttacaaggccaaaaatcttaagagtgatgcctggctttctctcacaacccacatccaagccattagaatatcctgtcaggtcttatcttcaaaataggttcataatcctaccacttcttacctcctctactgctagcaaccttgtcccagtcaccatcatgtttaaccagaattactacaatagccccctaattgatctctttgtctttttttttttttttttttgagaaagggtctcattctactgcccaggatggagtgaagaggtgtgagcatagctcactgcagcctcgacctcctgggctcaagtgatcctcctgcctcaccctcccatgtagctgggaccacaggtgcatgccaccatacccaactaattctttttattttctgtagagacagggtctcactatgttgcccaggctggtctcagactcttgggctcaagcgatcctcccacctcggcctctcaaagtgctggaattacagacagaagccactgcttctggctatctcttcacttctatccttaaattcctacatgcatcagccatagtcattttttccccacgacagggtcttgctctatctcccaggctacattgtagtagcatgatcacagctcattgcagcctcgtcctcctagactcaagggatcctcccacctcacagctttccaagtagctggtactataggcacctgccactataccaggctaattgtttgcattttttgtagacagagtttcaccatgttgcccaggctggttttgaactcctgggctctaacaagtcacccacctcagcctccgaaagtgctgggattacaggtgtgagccactgtgcccatcccagagtgatctttttaatccataagggagactgtcttcctcttcttctcaaaatcatgcaatggctgtcatttcccacagaataaattacaaagcctctacacaaaatcttgccctatgttatctctctgaccttacttcctatttcattctactttaatcactcttttcttgctatattggcctcattcctcaaatacaccacagaagctctcacttgtacactggctgttccctaggcctggaatgcttttccatacatgcccctttaactgactccctgtgtgcttcaagtgcttgctccaatgttactttctcaatgagtcctaatcctgccactctatttaaactacaaaccataccaaccttttttacttccttcaaaaatttcattcccctcatctgctccatattttttctcacagtactaaccgtcattcacatattatataacttacttttttttttattgtttataatctgtcaatgcctatttgaatgtacaatccacgaaaaaaagaatctttatctattttgtttattgctgtatcctccgtagcaagaataattcctgggacatagtgtgtaataaatagatgaggaactgaagctcaaaaactaaaagcgcttgtcaagtatcaaagctgaaacctgaacccagggctatcttcaaagccaatgctcttaatcttaagtctatgttgcctcatctattaaatgtaacaataacatacataaataagggtagttacacttagtaaagtctacgatgttcaaaatcacctcatataaatttttctttaaaaaagccctggaattatacttcaataaacactaaaaattataaaaaatctgttcatgggtgttttgcattaagcagaacatttgtgtatttaatcgacagctccagtcacctctttttccatatataaacttcaatatcatccaatacctcagtgttgaaatcagtcgaaagctatttttcaataaatatacactttgaaatgtttactaaaagagtaaagaattagtcattatttcattaattgccctatgaattagtaatcactgatataaatctatatcagtttttattgatcacctactacttgccacactctacatgaaaatgtatctctatgtttcatatagatcactgtagtaaccttgctactgttcttcatttcaatcaggtcttccctccttcaacctatcctaaacaattccgccagttatctttccaaacccgaaatatcacaatgactcttttgtttaaaatcttccaaggcttcccacgatcttgagggatctagatgcccaattccaacaacacctctccaacacacacacacacacacacacacgaatatcctgtacaccttcccacattacaatgccttcagatattctgttccctgtgtttgaaatgtttttcacacaaatgtcctccaatttttccataacctccaattttctaatgtttacatgacaaatcgtactgatccttgaaatgcacctcaagaatcatggttcctggttaagttttaagcaccctgtacttacatatttctatcacagaatttagcatgaagtattataattgcaggttactagtctgtgagcacctgtaattatttctgaaggaaaggattttagtagtatttaaaatcaaataaagttacgaatactcttttcgcccttttccataacatttatgagagatagagagcaaaccttgattcctagatgcaagttcaaatagttaccaaaggactgatagggtcaatcttccaacaacattacctaaaacactaatcgaacattgctgaaacagtaagtttgttcagaatactatctcgaaggggagtcagtcacatcttttaatctatactctgggtcttcagttccattaatgcaaaatcagctactacaaatcagacaaaaagtggtccactaatcatttcctcaatttctttttaccttttaatgatttcactcttttacatttgttttctcccttttatctctcttttcatctctgtactttcttcccttctcttacccaccactgaattttctttccttgaattcttctgtttctgttctttaagtagaaaatatacctccttatttcctctatcacctttctcaccacatcacattgcgaaacttgtcccccctcccattatgatcagcgtgtgatataagaaagataatatagacatctaattctaattattggctctacacacataaaataacttgatagaaagtccaaataagtatggcttttccttatacctgcaaatagaattaacagtttacttttcccaaactcagccacactttttgaaaaataaaaatcagaaatgtatcagtaagcttgcatctaaagaaaattataaaatggttaaatattaacatatacataataattgatatatcagagctccattacattactgactgaacaaacagtaaatacagaacccaaaaatatcaatgcctataggaaaaacccaagattttaaagaaaaatacaaaatgaattaaaataaaataaattaccttccttcattgacaagttcgataaaagcaaggcctgcattcttctgaatagaattttgccactcctataaaaaaaaaagcaaaaatagctgaagaaatgtcactcagtaggttctttcttttaaaacaataataatgaaaaatatcacccatatcaatttcatgcctaactcttaaaagttatgttaaaccatatgaacaggtaatactgaaaagtatactgacactaaacaagttagcaacaatttgattctgtgtaaattaaatgagcctatctatatttatcttgcccttttcattacataacacgatatactaatttatctgaaatagttgggagctgggaaagaaggtaacaaagaaaaccaaggacaaatagacattttggttttggctttgtttttccatttattttaagatgtattacccaaaatgaagagaagaaagaattaaatagttcaataaccctaataaaaacagcatagttcaccataaaaattgatgactagcaactgaaaatgaaattagaaaaatcagtgaattgagctaaaccagttttgagttagaaactataattcactgccctatgaattagtaatatctggtataaatctactaactatattcttgatccatttgaaatttacccattaaactttatccactaaaaagcaatccattaaaaagcctaggaatgaaatcaatcaatagagtatgtacaaatgaatattttaatccttaaaacaaaaaatatatataataagcattaatacaataaggaaaggcctacatgaactgaaatatacctagatttgaaaaatgctcgtgaatgccacttgtgtgtatgtgcgtgtgtgtgtgtgcctatataaacacacacacaaagatttgcttttaaagaactggaaatacatacataatcttcatatttcttaatatttaaggagctctttgtattctaactacataatatccctcaactgatctttttttgttctttcataaaacccaaatcaaaaggccatgtctggctacttaccactgctcactataaaccatattcatattttctgagtgtaataactctaagactttcaaattccatgcaatttcaccctaatagctattccgttccactccaaattcttttctttttcattctcatcctttctcttctaccttctcttttccatgtccactttcatacttaccttcttttgtgtttttgaaaaacccaaggtggttcttaagactaaaacaatcacatgacatgattttgtcaaaggattatattttatgaatagtattagtataactatgctaacagaacaaatacagtagaataaaaattaaatagaaaatcagtaaaacgttggagggtagtcactggctagaactagcagagaagaaaaagtaacgtattctcaaggaatgagcaagaaacaaattcataaaatccatgttctcattctgatactaacagaatatatccttaggcatatcgtgctacatctgcaggtcttagatattatcttctaaaagtgtattctaggtataatttttattattctaaaatttactaacatttagaaattcatgacttgtaattgtacaatatatactctctaaaattcatactgaattcatattttaccaaaactgtaaaacagggatactaaattttttccagcgaggtaaaacaaaccaatataaaacagaaatatgaatctaatttaaaagcattttctttccatcaaaataaaatgaagacaagtagtccaaaaggaagcaatcaaattccacaagactatattcttgagagaagggcatgtgccacgaaaaggtaggagaatgatgacaaaaagcagaaacctcaaattttttttttattttggtacagagggtcccacacctaacttcccaagcacagcacagagagataagactcaaagacttaccctaaatctagtaatgcacaagaacagtagaacaggaacaaatttaaagacagatggacctcagctaggaagattcaaaaaattatcatggaaggaggcagaagcagcttaggatttaagaagatgaagagaacataaccatgacctctgtggataggcagcaagtgatcagcaagaagtacgatacttcaagagatgccacagccaaacaacacaagcatatgttcattcctcagctcttatacctaacataacattcttggaaacccaactagaaatttgacataatacaagaataggaaggaaagtgagacctcaagttgagtgagttttcacttagatcatttaacttacagaaaacttcaaaatagaaacttagttaaagaagaaaatgaagaaaattacctttcttgctagaaaaaaagaagtcagtaattacagaagaactaaaattctgtatataaatctttagattagtcattttacttttaaaagtatccactgtcaggaaaacgtcaagaatgtcccctctcaccactatctttcaacatcattctggaagtcctggctaatgcagtaagacaagaaaaggataaaaattgaaaaagaagaaataaaactgtctttgttgatgacataatcatctatatagaaaatcttaaataatctacaaaaaatcctggaataagcaataaatagcaaggttacaggatacaaggttaatatacaaaagtcaaccactttcctatgtatcagtaataacaagtcacacactgggataaaatcatttgtaaaagacatctgataaagaattgtgcaaaatatacaaataactcttaaaagtcaacaaaaacaaacaatcacattaaacaatgggccaaagactttgacacctcaccaaagaagatatacaaatggcaaataagcatatgaaagattgtccacatgtcactggggaaaggcaaattaagactagataccattagacacctataagaatggccaaaatccagtacactgacatcacctaatgcaaggatgtggtacaagaataaatgaaatctcagtcattgctggtgggaatgcaaaatgatacagtctcactggaagacagtttgatggttcctaacaaaactaagcctactcttaccacaagatccagcaatttcactttttagtgtttaaccaagggagttgaaaacttatgaccacttagaaatttgcacatggagatttatagcagctttattcataaatgccaaaacttagaagcaaacaaaatgtccttcagaaggcgaatggataaattgtggtacaaccagacaatggaatattattcagcgctaaaaaaaaaaaagagctatcaagccatgaaaggacatggagaaaatgtaaaagtatattactaagagaaagaaactaatatgaaaggttacatactgtatgatttctactatatgacattttggaaaaggcaaaactatggagaaatgtaaaaagatccgtgtttataggggttagtgggaatggaggggagcacaaaggatttttaggtcaataaaactactctgcatgaaactataatgatgaagacacaccactacacatttgtctaaactcacagaatgcacaacaccagagtgaaccctaatgtaaactatggactttgggtgataatgatatgtcaaaggaggttcatgcattataacacacatgccagtctcgtgaagaatgctgacaagagagaaggctatgagtgtgtaggggaaagggaaatgtgggaaatctctaccttttgatgaattttgctgtgaatgtaaaactgctctaaaaagtaatgtcttttaaaaattagtaataaaaaagtatttactagtactatttttctcaaatccatttgttctgatccaaaactgcaatgggaaaggatttttattacataattcagacaaaatgcaaaactccacatggatgaaatagataacagcagaaagacccatatattaagtaggcaggtaaagggtaaacatcatttagattttattttcattatatacagaaacttttaattacattgtcaaatcagaaattgtgccatttagatttcacaaagattttaagtagcattattggggttagactgaaaaccagttaaagttagtataactatcaaaacttaaccacactaaaaatttgtaatctaaacttatcttggtatgtcacaggaaatatttcttttcaattaaaaacaaattagacatgaaggtacatatataattgaagaagttcagtgttttatggaggctcagaaactcaaatttattactagtaatacattatgcttctggttttctcgaggatcatctataaacccatatttgttaaccttcagtaattattacataataacctgaaataaaatgttctcattaattttttcaaattggctaaaattaggaataaaatgaaaatacaaaccttatacttttggttattgttaaaaattatcacaaatctcaggaatatccttatgttttcatttctctataatacagtcctaattactaattattaccatttaataaaataccaaatgccagatatacaaatgcatactaaaaagaatagcctatataaaaagaatctgaagcccatgagaatattttttcaatttgtttataatccaggtgttagtcaaagccaacaagttttctccatactaaaacattctctacagtaattcacagaagttgccaaaactaaaaagaatattcctgaactatgctatcctaaaccatttttctccacttcagaaacaattatcaaggaaggtgttagtctaaacaatttcataaaccacagctcaatataacccttagtgagttttaatagttaaaagaaaagcttaatggtcatcgtctttcatgatcgtttcaatatttcatcacagtatttacaattatacagtgatgcaaaatgcatagtacatttaaaggtcttggttatccttctcccagaggtactgatgaaaaacatgttaaaagcctcaaatccaaccactaatgcaactaagtaatttcaaaacacatttcagcactttggagaggaagaactcaaaacaaaacaagagagtcaataatttcatacctgttcctaagctgtatttaattgactatcacttcctaaggccataattgttgactagtcaatttttactaaaatatactcttagcttactgatgcttttaagtcacacaacaaaaacagtgaagataatacatattagtgaaatctactacatagatctccaccaaatttcaagactgtattcttggtggtaaaagttagttagggcaacaaaagacttcattaacctaacattatctattcctgcctatcctcaacaaataaatataaagaaaaagataccaattaacacactatgcattcaaattattgtaataaaattctaatttctttagacatgaacttgacagttttctataaataatctcctagaacgtattttagtgacgaatacactaaataaatttatctcaattttaaaagtaattcccaaatattagcatgttctaaagcagaaaaaatcaggccacagattaaaaagattacatataatctactctgctatcattttattttgtcaagccatgaatactgattaacattaaatatagtagcatttgattctggtgggcagatctttaacataacttttagtattaaaaaattttttttctgtaatcccagaactttggggggccaaggcaggcagatcacgaggtcaggagatcgagaccatcctggccaacacggtgaaatcccatctctactaaaaatacaaaaattagccgggcatggtggcgggtgcctgtagtcccggcttctcaggaggctgaggcaggagaatggcgtgaacccgggaggcagagcttgcagtgagccaagattgcaccactgcactccagcctgggcaacagagcgagacttgttgcaaaaaaaaaaaaaaaaaaaaaatttggccaggcgcggtggctcacacgtgtaattccagcactttgggaggccgaggtgggcagaccaggaggtcaggagatcaagaccaacctggccaacatggtgaaaccccatctctactttaaaaatacaaaaattagtcaggcgtggtggtgcacgcctgtaatcacagctactcaagaggctgaggcagaagaatcacttaaacctgggaggcagaggttgcagtgagccaagatcacgccactgcactccagcctgggcaacagaatgagactctgtctcaaaaaaaaaaaaaaaaaaaagttttttttttcaagagaggtagataatgagtgacttcaggttaaacatagtaaatctgagaataaagagggggcaacagtacatgagatacattaagaaatttattttacaacctggaaacacatgagttagtagtaataaatgcacttagaggaccaaagaaaacaaaactctacacaacaaagtagaggaatcaacatgaggaaggaaatcaatgcttgtcacaaaaactccagaaaagctaggaattgaaggcactgagtacatacgaaggtggctgagggaaagagatgcaagttggcataaaaagaaagttagaatcccacatcttctccctatgctgtgtagccatcctaccatggtaaacattggaagtttattttccagaaaagttataattaaggaaattattaaaaagctataatgaaaaaggcaagataaattgaaagtatacaaactggactatgacattgtgagtgatatttgaaaacttttctgagaaaattgagaagctaggataaaaggtaatcctctacaaataacaaagggaactcatgcatcaccagtggacaactcatacccagacatatagattttctctgtgttatgcttaggaatgagcaaattgccaaagttaaccagacatttgaggaaaccctcttctgtgatgacagacaccaaagcaaacaggcagaggagaaaaacgactcatagaaaacagacaatattgttaagagggtgaggaaaagaagattaaagaaaagtataattaaatatcataggaaaatttttttaaatttcatctaaaatatcaagatagggattttatcaagtgctgtctccttttttttttttttttttttttttttttgagacacagtctcactctgtcacccaggctggagagcagtggcgcaatctcggctcactgcaacctccgcctctgggttcaagcaactctcctgcgtcagctttccgagtagctaggactacaggtgtgcatcaccacactcagctaattttttattattattatttttagtagagatgggttttcaccatgttggctaggctggtctcgaactcctgacctcaagtaatccacccgcctcggcttcccaaagtgctgggattacaggagtgagccaccatgcccggcctatcaactgctatttctatgccccggtattaatcaggattcttcagagacacagaacgaatgggaagagagagagacagagagagacacagacagagagacacagagacagagagagaaagagagaagagattataaggaactgactcacacaattacattggctaacaagtgccaatatctacaggatgagtcagcaagaccaatggcacagtctgaaggtcagcagcctctagacccaggaagagacaaatttgaatccaaaagtgagaaaaaactaaagtcataattagaaggcagttaggcagaagaaattctctctactgggggaagagtcagccttttggttttattcaggcattcagctgattggataatgcccaacactaacagggagggcaatcttttttactcagtctaccaatttaaacttaaatttcatccagaaaagactctcacagatacagctagaataacatttgaccaaatatctaaacagcctgtgacccaaatgacacacaaattaaccatcacaagtccaccccttgtcagcttggcactcatatacatctcctcaaaccacatttcattaccaaatgaagattaataacaaggttataattctacctaacatgatacaactattctgtatacaaccaaaaccattctaaacctgtgacagtcaattttatgtgtcaacttgacaggactaacaaatgcccagggagctgataaaacatgatttctggttgtgtctgtgaggttgttccacaacagatcagcatttgaagtggtaaagaagatctaccttcaccggtgtgagtcagcatcaatcacccgatttgttgagggcccgaataaaatgaaaaggcagaggaagtgggagttcatctgtttctgttgggaaagacatcctcttcacttgccctcacattagcactccagggtctcaggacttcagactcagactgggacttacaccattggttttcccgggcctttaagttttagacagcagatcatgggacctctcagcctccataattgcatgagccaatccctcataataaatttctttgtctgtatctatatatatcctattggttctatttctctggagaaccctaatataaacccattccccaccttagctgatatgtatactttcctaatatcccacaatttacatatttacatactaggatgtacagttaacaatatgatctacagttaacaatacttaaatactatggtgttgatattataaactcaatacatcttaagttgcatggtgagggattaaaagaggaaagaaaacaaagattttatatatatatatatatacacacacacacacacacacacaaacacatatacacacacaaaataagaaagaaatgtaacaattacatttcttgttctgtaaatggtcatgtgatcacagttggtatctacaactaccttttttcactgcctattctgtattccctttgtcttcagcaagcacctcagctggtcctggtactgtacctaatagggtgacccaaagcttcattcctgaagggtctgggctgctttagtagtcctacctggattgtattaccagtgctcctcaacttaatcacacagtatggtaatactaagatatgcactgaggaatctcttgtattctagacatactcttccttacttttattgtggtatagttcaatttccccacagtagtcaggatcaatcactactcttagcatgataactccatttttgcctgaggattcagaggcaggaggagcccaaagtggctgggaagcaatcttaacttccggttcaatggaatcattgttgtgcctcctggtggaagcatttctccctttggaagtaagacctctaggccagcagactgtaagatcacaggaacaggaagcaaaacttttgctattgggtcactagaggtaataacaagtggtaacactcccatttctacctgttgattcctggaccaatgaatcctacctgtggggagaaacagcaccatatactggatgctgattcagtacacatatatccttctggaaaaccttgtcccagccatataaggtattgccacctacattcagttctatcaagccagctgcttgaggatggtggggaacatagcaaggccagtgaattccatgagcattcatttgctgtgaaatagatttcttaatcagaagcaatgctaagcaatacaatgaaggttgataaagcattctgtgaatccacagatggtagtctgggcagaagtacggcatgcagggaagataaatttgtatccagagtgagtgtctactctgataagaacaaaatgctgccccttctatgatggaaggggtcaaatgcaatcaacttgctaccaggtaacaggttgatcatcctagggaacagtgccttatcagggacttactgttggtctccactgccagcagatttgacactcagcagtggccacagccaggttggcttgctgagtggaagttcaggttgctgagtccttggataacctccatccctgccaccatggccaccttgttcatgagctcactgggcactggtgggcggctggggaaagaggctgactagtatccacagaacaggtgttcccagccactttagtattaaaattatcctctgttgaagtcacccttcagtgagcattcacataggacacaaatacacagtattcagattttttctcccattcatagacatctatacacatacctcttcccctaaactttttttgtcaacaattttctactcatgtcccttccaagtctctgaccatccagacaaaccaatagccacagcccatgaattaataatcacatttatccttccaaaaaaagtaaacaatcaggtacactcctcaaagttctgtccactgagaagattattcttcactacagtccatcagggatgtcccaaaaaagggctgtagtgctccaactgttcactttcaggtggtgcctgcatattgtcagaacaatctatacaccaggcccaagtcttctcctctggcaactgatcacaggactcaccaagagaccataggtacgggctggcaaagagaaggtagtgtagcagaactgaggaccataggatatttgggccacttcatgcaacttacttgtgttttcaagcattgcttgggcctgatcacatgtacatcacttcgatttgatgacagagtgcttctgtgcatgtacaacttgatggcttagtaggacagataacattcagttcataataagcagctcagtcacttgttaatttggtggcccagtgttaactgttcagtctctacttaaacctagtgacaggccaagagttgtttctcaaaaggagaatatttgtctgggaaggatgtcagggccttgctccaaaatcctatgggtttgcattgcaatttacctaaaggggcccgtcaaaggctccaaatagcatccccatctgccactgacacttgaagcaccattagatctcctggagcctatggcttgcacagcagcctgaacctgttacagagccttctcttgttctgagttctactcagaactatcagcttttcaggtaactcagaaaatgggacagagtaacatatccaaatgaggaatacgttgcctctaaaatccatagagtctacagccataccaccctgaaaatgcccaatctcatctaaaagccataaacggtcactagcatgtacctttttggttataggaggggccagatacaacttattcttcacctaagaaggggtatctcgacatgtcccacaacactggagccctagaaatttcactgaggtggatttaccttccaacttctgacatgcaaatgccttaccaaaaagtctggtagttacaacttcttgctcactaagtggaaccagcataatgtcatcaatgtaatggacgactgtgatttctctgtggaagtgaaaagtgataaagatccatgcaaactaaattatgacatacagctagaaagccagatactcctgacatagagcagttaagggacactgctagccttgctagctgaaagaaaacgacttctagtggtccttattgacaagtatggagaaaaaaaggcatttgtcacgtctattaggtgccagggaatgtgtcaatttgctcaagcattgaaaccacatctggtacagcagcagtacttggagttaccacctggttatgcttataataatacactgtcattctcaaagattcatgtgtcttctgcataggccaaataggcaagtgagatgaatatatgctggaaattaccacacctgtgtcaaatccttgatggaggaaaatccttccagaaatacagtattgcttttggcttataattttcttaggtagaggcagttcagtggcttccacctggggcctttcccatcataataaccctcactcaataggtcaggaaaccaatgtggagacactgccaatttctgagtatgtctattccaactatgcattccagaacttgggaaataatgacaagatgaattcgaagactcactaggcctattgtgagagagtgctcacctaaaactctattgatcatctggcccccataagcttccctgatattttaggtctcttggactcattgtcacttcagagccaaagtccaataatctgattatttccttttccccagtgaacagtaaccctggtaaaaggtcacaggtccctttgaagaagagtgaggaaaagattaacagtataaattttggtggcacaccagtgtatagagcacccttgacataacatagacatctttctatcttagaaaaagactccattttatatttcatggagcattttgccaacaaggatgttttgtttaattaaaaaaataaatcaaaacctaaaaattgcatccaaccagatgaggatacaacagacacattcttccactatcagttctgaccagaggactctgtgactatgaaagattaggccttcaacatcttgcagtcacttgtgataagaatttggcatctgctgacaaaggatctaccacctcaaagacttgtcgttgtaagactgactgaccacccagccgagaccaggactccttttgtcttcttcgctccccaaggactggtttattaaccctttctcctatctcttttccctctcgatgttaaaatgttactttgttgtggaatgtttaacttataatatttatacattgattaaatatactattatgtatggtttgcaatactgactgacttgtagaatggcttcagcctgtgtgcccacagctctgactactgagtgaacgggaagtataaggataattgcctcattgagaaatccatgtagcttgtggcttttgtgattaaaatgcatcaataaaagcctgacattgtgaaaagacacatatatgtgtggacctggttacttctaaccttgtactggtcatgagaaaatgagtccttcctcaaggggacccagcttccccttccttcacaaagttctggtcctgtaaattggctcaacttgggaaattgattgaggggccatgactcactgcttttatgattaaagttaggtatttgttcacttgatctagaacttttctgcgtatacaggtaaaataaaaaaattaataggcatactatctacttctcccctacatacaccatgatcaattcaccaatgtcatagatctgctccagtcaaatcagcatcacagttctgcttgctgctttgactctgctgtccattatggtgaccacattcaacttgcctttggtgactgaatgccaccacttggctcctgccagctcaggatccaattactcccaatgcgttcaggttttctaattgaccagctgtagttcctaccataaggtctgatctacaaagaagggtagtcgtagagctcttcaagaaagctgagcctccctttaaaaatttatttctcacagtacacggaagtgtatcttcaagaccctgcagtgtgagtaagtaggtcttacattataaatctactccaaagttccaatctccccaaattattttatttatttagagacaaagccttactacatccccagtgctaaaacagtgaccagtacatatgaattagtgatccacaaatgttcaatcaacatacatttctaaaaggaagtctgcaatggaacacacacacacacacacacacacacacacacacacacacacacacacacagtgattgcagcataagagaggaaagagggaaattctaggctgatgataaaagaagcgtctaacataaaagcttcctatagatctaaaggacaaccagactagattggaataggaaaaaggggactctaggtgctatatttccaagcaaaacaattgaaccaataaatatccagtgggtttaaccactttttccaatgcgttttatgattacagagaaaaatttaaagatcaatttgtggtgagtgcacagaaatataagtaaaggaaaaaggacaaaatcattagttctacaagaaagaatgaaaaaaaaaaaaaaaaaaaaaagaccagcaagcaagagaggggagaggaaggacgagtaagggaagagaggaggagggaaaagagaagaaggagcagagaagagagaggagggcagaagaggagaaaagaggggagaaaaaaaagaaagaaaaatatgtaattcatagtacattttttagctctggcataaatacatgataataacgtaaatactaagtatggttttaacaaatgttattatgaaagtatattagaaagaagcaggagagtgaaagttaaaaggagaggagtttaagtactcaatggtcgtctttcacaaaagattaatgttcaaagtttaaaaatcaagaaacagtaattcatggctgggtgcagtggtgcacgcctataatcctagccactagggaggctgaggcaggagaatcccttgaacccaggaggcagagattgtagggagccaagatcatgccactgcattccagcctaggtgacagagccagactgtgtctcaaaaaacaaacaaaaaaagaaatagtaattcaagcatatcactgtcaacaaccaaaaacatttgaaagatgtggctgcttccaagagttaagaatcaatcacggggaagagggggaaaagaggcagagaactattgtttatctgtttcgtattatactattatttgggtgctttatttgatgaaaaataaattttaaattaaaaatcatatgcccagctgaacacactggctcacgcatgtaatctcagcactttaggagaccaaggccagtggatcacctgaggccaggaattcaagaccagcctggcaacatggtgaaaccccatctctactgaaaatacaaaaattagccgggcatggtggcgggcacccataatcccagctactcaggaggctgaggcagtattgtttgaacccaggaggcacaggttgcagtgagccaagatcgcaccactgcactccagcctggatgacaaagtgagactccgtgtcaaaaaaataaaaataaaaataaatcatatgccctaaatatatagaatagtagatgaataaaaaataaaaattgtaatacacacatatttttgtaactggacaacaggtatttatccaagattattcttgaaaatctctaaaaaatagaacatgcattcaagttttacaaatatgaaaaaaactatgaaaatacaaaagtattataagctaactattaagaatctgtactttttttaaagtcagttttttgaggggttttgttgttgttgttgttgttgttgttgttgttgttgttgtttgaaaaagacagggtctcactctctcgcccaggcaaagtgcaggggcatgattatagctcactgtagcctcaaattcctgacctcaagcaatcctcctgccttggcctcccaaagtgttgggaatattggtatgagccactgcaccggatctaaattcaatattgtaacctaccaaatggaatttgagtttatttccatttctactcgtagtaatactacccttttttataagttttgctctcagaaaccaaacataatttatattaaagaataaagaaaaaaaaaattttaaacctgaactcatgtcaaactgtttcattttccttattataaaaatataaaaatttaaaggtttaggttcttcaatgaaatatccacattgatttgttaagatgtagttatctatgcccttgtaaaacgaagcgaattggatggatgtacctccaattacctaaatagttgacagaaacactcctaggagttcagggagaaagccagggaggatagctcaaatgaggaagggaatgtattaacacaaaactgagaaacacattacacacaagactaaaggtcaaaactaggcaaaactggccaggtgcagtggctcccatctgtaatcccagcactctgggaggccaaggtgggaggatcacgaggtcaagaaattgagaccatcctggccaacatggtgaaaccccgtctctactaaaataccaaaattagctgggcatagtgcatgcctgtagtcccagctactcaggaggctgaggcaggagaatcgcttgaacccaggaggcagaggttgcagtgagccaagatcacaccactgcattccagcctggagacagagtgagactctgtttcaaaaaaaaaaaaaaaaaaaaaaaaaaactaggcaaaactgttcatgctcaagatacagtaatcttaagtgctcaaagtaaactatcattaacttttcaacaatgtttgcactttgtgtcagcactctctcaacatcatatctaacacaaacttaaataatcacataccacaaaagaatatagtgtaacaataaaggaaagattttattctattgtgtctttaatcactctgtgaaatagtaaaatagaatactgcccttcggaaagttttggtttcccttatttttgtgaacatattcatctaatatgtacctgtagcttgtataaatattacaggtcagttagtaaagaactgaataaagagaaagtaactattcatggcattcacaaaatatataaatatcttaaactccaaaaaattaagataaccatgcaaatcaattatgtaattactataaacacatttttaattatttgtaaataatcaaaaaatcctcttgcttttatgtttaggcacatgaaatattaatatatttgcaagtacctctaaaaatctgtatttacagtttttcaggtaaaacatatctccagacaataatgatccttccagtgacttccaaactggcatcaatttactcaagatctttcactaatcaatacagaaagcttaatttccataaaggtgacaaaaaagttgctctaactctttccagctacaagctctcaacagatgatcatcattaagtctgtatcagggctccacatttaggagccatataaatgtgtcctattagtacacggtcagtctgtttggcaactctagttcttcagacatatggcaattgctgccctttgaggtctgaagtcaagtctttagggaatctcaaagcttgcactgaaattacaaggagtgttcattagagacttctggaggggaaacatgaaagacttccattaaaactatataaaacagctaattatttttaaaagatttttaaaccatctaatgttctcaactataataaaaagtatttaccaactgaattatttttagaagcactacttcaggacatgggtgcaaacaggtttcttcctacctcctatctcccacctcaatacatacatatttattttataagaattatcaactcaagatttcaatacttttaatttagaattaaattatctcatacttctaaattctgtctacagaccactataaacattttctaaacaaagttattcttagagacaaatgtttgttttctaatatttagcttaggataatatatagccaacttaaacccagccagaaatacatatgtgtttctttttaaatgtttcttttttattcaaaagtctgcctctattttaatttttattttattttaaactaataatcataaaaaattttaagcataaaatgatataaagtattagtcaataaagtggcatttattagataatattatgcaaaacaggaaaacacatgaaggtttaatgtttactttttttaatatacttaagttgataaggaggagttcaaagaaatctcatatatttactgtcagaattttgaaaaacataaaaagtatattttctaattaatgattgcttccattttaactttttgaatgtctagacactttttaactcgagagaaaatcattatttattaagttttgcaataaaacaatcctactactgaatatttatttcagtaacaaatctttataaacttatataaaattcattagcttgcctcaatcatttcttgaatccacatatatgttggtttctgacagcgtaattccaaaaagtaattacaacctcaatccatttgtaaaaagacaacagaaaacaagtatgttacaccagtttaaaagaataaaaatctaaagaaaacagattacaaatgatttatatgaatgcctagtggtgaagttaattacaagtaacccaataaaatagtgcctttattattgtacagcaagtaaaagctctagatgtaaaaaccagaactctttctgctgacttctgcatgctcaatcccacagcacacaacattaagaattaaacatgtggtaaataagccatatagaaaacagcagtttttaagtaaaagcagaaaactttcctgctgtttaaccatttggggccttctactctgaataacaaccactgtaaactggcactatgtattcatggaataagtttttatggttaatatgaaaatgagattttaatttcagtgctcaaagtttaactccaaataaaacataaataactgtaaaataacacagcattcattttagcattcagtaggagcaaataaggtatcttatgtttatgctatgaaatggtgatatctacagaatttaaattttccaaacctcataatacatctacctataaagctttggtctctgaatttaaacatatattagcaaagacatatacactttatgttacagtaacttcttatggttgtcaagagtcacaacctaaagccagtcatagtatgcttaatgactttcctggtgtacagaaataagacctttcaatccagaacgactcagtaactcttatcaaatatttatcaatgttctcaatgagacaatagctgataccaactatatatatatacatatatatacacgtatatatatatatatgtgtatatatatacgtgtgtgtgtgtatatatatatatgcataccaagtataatacaaagtcctaatacatattatgcataaacatcatgatataagccagcagtccccaacctttttggcaccagggaccagtttcatggaagacaatttttccacagacaagggggtgaggggggggaatggtttcaggatgattcaagcacattacatttatcgtgcattttattttatttatttatttatttattttgagacggagtctcgctctgtcacccaggctggagtgcagtggcaccagctcggctcactgcaagcttcacctcccgggttcatgccattttcctgcctcagcctctcgagtagctgggactacaggcgcccaccaccacgcctggctaattttttgtatttttagtagagacagggtttcgccatgttagccaggatggtctcgatctcctgacctcatgatccgcctgcctcggcctcccagagtgctgggattacaggcgtgagccaccacgcccggccgtgcattttatttttattactacattgtactatgtagcaaaataattatataatgaaccataatgtagaatcagtgggagcactcagcttgttttcctgcaactagacagtcccatctgggggtgatgggagacagtgacagattatcaggcattagattctcataaggagcacacaacttagatcagctgcacgcacagttcacaacagggttcatgctctgatgagattctaatgccgctgctgatctgacaggaggcggagctcaggcagtaatgccagtgatagggagcggctataaatacagatgaagcttggctggctcacctgccgctcacctcctgcatggcctggtttctaacagtccacagactggtactgtggcccaggagttggggacgtctgttttaaaccattgtttgatctacaacataactgaaataataaatgatgaaatacttgataacttggttttgccccagaaataaaacaggactgataaacaatcaacagtgcatctctctagtggtattttattcctattaatttcacctccattagaaatcaatacaatattaatttattttgcacctttttttctgagtcaaaatcatcacaaatctgtctcctcaaccctcctactttaaaagtagggacctctaccctccttaagtcctcaacagtgcctaattcaattttccatacaacaaacatttgaatacttgtttttatttttttaatttttttgagaacagggtcttgttctgtcactcactgaaatgcagcggtgctatcacaattcactgcagccttgacccccctgggttcaagcgatcctcccatctcagcatcccagtagctaggactgcaggtgcacaccatcgtgcccagctaatttttgcatattttgtagaaacagggttttaccatgttgcccaggctggtctcaaactcctggactcaagcaattctcccacctcagcctcccaaagtgctgggatttcaggcgtgagccactgcacctggtcttgcttgttaaataaatcataacttaacactgttactgaaagagggagaaacacttcattaagaatactcagagactttcaaagcattactggatatattagtttcttgtagctgctgtaacaaattgccacaaacttggtggcttaaagtactataaatttgttttctcataattctaaaggccagaagtctgaaatcagttttactgagccaaaataaaagtatcagtagagccattctccttctggagactccaggggagactctgttccttgcttcttccagcttctggtggctgtcagcattccttggcttgtggccaaagaaaacagggtctctctgctccattttcacattgccttgtcctccatttctctgtctgtagcctcccactaacgatctctaataatgatacatacgataacatttagggtgtacccacataatccaaaattatcttttcatctcaaaatctttatcttaataagatctggaaagacatttttccaaataaactaacattcacaggttccagggatttgtcatggctatttgttggggagccatgtctcagtcaatcacgctgaagaaaccaaatgagaacagaaagagcaagcagacgaaaagtgaaccttaccagcaagtgcaaattcaaaatatgcaaaggaaacaaaaacttttttttttaaatttagtgctgtgtggcaagaactggaaaaaaaaattaaacaaatcaagtcaccttatgctccaagtgttggttctaataatgactgcattgtgactggttttgttttcaatgtcagaaattcagcttaatttgttaagtataaagcctatcaggctgcaataaactgaaaggtgggcagctgagcttcttgtgacaagctgatatcacaccgagcaatctaactgcctaatgccagagtacttaaggcagcagtccagatttgctaaggagactggttaagcaacagaaagcttcttaaaagttctccctcattattttactttctcactgcccctaaccaacttctttttccctttttaacttacaatactagcaaatagaatcctgttctcacgaattagtagcacttcacaaacaattataggataatagcgtaccgttccaatggatagaaatacaagacaagtctgaaagatcaagcaactttctaagtgctctcaagtaaagaaataggtaagcttttctgagaaaaagaaataaaaagaaaccaaaattaaatttaacttcaattttgtagtatctgatacactgcaacaagaataaactgacaagccagccagcaaacaaggcagtactgatgtttcaattaaatgcctaattataatctgagcttctaaatgaagaatttacagaaataaataattactaccaaaaagaatgcactgtgttgtatccagtattcaggaccttggtaaacagtttcacactcactatctataaaagcccactgtggaagagaaagtgtcaggagaatgtggggaacagatttagggtcacacagtttggggtttctggttaactacctagaagatagtgtgatatgcttaacacatatgtctcatatatggatactatttgtaagtcagcatggaaataagtataaatgaaaataaaacagctattaagaggccttgaaaataaggcagagaagtttgaatttgacaaaacagtaaacaactacagcttctcctggaaagaaaatataaagacactctactaggaaagtaaatttgttagtatgtactcagagataaaatcaggagaaaggaaaaagggcatttcactaattcaggaataaattggaccagaatctaattcttttatctcactctctgcccaagttttattaaggtataactgagaaaaagaaattgtatatatttatatatccaaggtgatttgatacgtgcataaattgtaaaataattaaatcaagctaattaacatatctatagcctcatatacttatcactttgtggtgatgctgtaggagttattaagaaattattttaggcagatagagaggaaaaggggtcctcgggaagttttcatttttaaagctgcttcagaaacgtttcttgtaaaagtcctggctctttgagcctgatggcaacctttgatatgcaaatttaggccatttgaaactgggtccacccaaacttggtgattatcgctgcctttttgcccttgccccacatgatcctggcaacacagctgcccccacatatccccatgtgtgtagaacatcatggtgccctgtatttgcatattaaaaggctagggtgggaggcccagcctttttgccctacgtgaatgacatgcctggtcaaaccaatcccctgagccctatgcaaatcagacaccacctcctccagcctctacatatacctgactggtatccactgcatttggggttccctctcttggctttggagccccgctccctctgtctctgtacaggggagctccttccttctttctttcccctttctatcttgcctattaaactctctgctccttaaaaccactccacgtgtgtcagtgtcattttatctaaactggcatgaggatcaagaaccctggtgttcctccactcatcggagtcatatcagtgagaacatttaagatctacactcttagccagaatctgattctttacagagggcttttgaaaatgatatttccttttatttctccccaatttgtaaccacccaatgggctcaccttgcccgctgcctagacagagccgatttatcaagacagggaaattgcaatagagaaaaaatcgttcatgcagaacctgctgtgcgtgagataagagttttattatcactcaaatcagtctccccaaaacctgggggtttgtttttcaggataatttggtggggaggaggccagttagtcaggagtgctgattgtttggattggggatgaaatcatagggagtcaaagttgtcctcttatgctgagttagttcggggcgggggcgtggggacagaactggttggcaagttcaggtggggccatctggttgtcagaaatgcaaaaacccgaaaagacatcttaaaggccaatcataggttcacagtagtgatgttattttcgagagtatttggagaagttgcaatcttatgacctctggaaaaatgtctggtaatatttagaattccagcccctctcatcctaacttggtggctggtggcctttcattcattttacaagaacagtctagcttttgggaagggctactatttaaactataaatgaaattccttgtcaaggctagtttggcctacgcctaggaatgaacaaggacagcttggaggttaaaagcaagatggagttggttaggtctgatatatttcagtgtcataatttccttagttataattttgcaaaggaggtttcaaattctactaggactcaggaatcatcataatgaacaactgttaatgataataatgtacttgaccagaaaaaaaaggtggattatcacagaactagattaactactataaaagtatttctcaactacggtaaaacaggaggtacgttgaaagtaacatagtataaacaaaaagcactaaagttgacaaaaggggcacttaaaaacaattagagtagtaatacaagtaacacgacatcagtgttacttgtattttggtacattttgtttagtatcccagaaagggcagtcattaatagctagcacataaaaaccacggaatcatctttgggagcctattgaaaaagtgaatgttatccattatccttgtctacatggaaatgaaggccagaaatggctaatctatgagacctcgtctagctccaccaggttaggaggatgagaagtgcctgaattctgttaagatgtaggcatagttatcagccattgttccagaggtcacaacatttgcaacttccctaattactcccgtaaataacatcactgttgtagaccctaaggttggccaccttttgagatgtcttttaagacttttgcattttgcatttcttttttttttttttttgagatggagtcgcctgggctggagtgccaatggcatgatctcagctcaccgcaagttccgcctcctgggttcaagctattctcctgcctcagcctcccgagcagctgggactacaggcacccgccaccacgcccagctaatttttgcatttttagtagagacggggttttgccatgttgtccaggctggtctcaaactcctgacctcagatgatccacccagctcagcctcccaaagtgctgagattacaggcatgagccactgctcctggcctagacttttgtatttctgatgaccagatcactccagccagactcaagattcatgactcaagggtcctgtagccctcacccagaagtggactcagcaaaagaggaccattttccaccatccaatgattttatccccaaactatcagcagcactctgaccaaaaaaatatgtttaaaaaaccctagtctccaaatttttagggaggctgatctgagtactaataaaactccacagtcttctatttagccagctgtatgtgtattaaactttttccctattgcaattccccagtattcataaattggctctaccttggcagcaggcaagaagaacctattgggcaattacattggaaataccgaataaatgaagaggattttgagtgctgttaaaaaatactcagattcggccaggtgtggtggctgacgcctctaatcccagcactttgggaggcaaaggtgagcaaatcacctgaagtagagagttcaagaccagcctggccaacatggtgaaaccttgtctttacaaaaataaaaaaaagtcgccaggcatgatggtgggtgcctgtaatcccagctactggggaggctgaggcgggaagatcaccgcggaggttgcagggagccaagattgcgccactgcactccagcgtgggtgacacagacagactccatctcaaaaaaaaaaaaaacactgattcagaattcagtaactttaatttacaacctactttgctctgtaaacagtactgcatagttttacatgcactgcctaataagatccttttttaaaattgtttcgagaaagtagtgttagaattatatgtggatcgtaaaaatgtaatttttaacacgagatatagaaatattaatttaaacattaaatttataacaaaggatatgatacgtttaattttgtttaacaccttttactagttaaaaacttcctagcatcttctatctcaatactttttgtttttttctttttaatctttctgggtacataggagtatatatttatggggtacatgagatgttttgatacaggcatgcaatgcataataatcacatcctgtaaaatggggtatccatcccctcaagcgtttatcctttgtgttacaaacaatctaattatacttttttcattgttgtaaaaatgtacaattgaattattattgaccatagtcacactcttgtgctatcaaatactattattttatttataccattaaccatccccacctctcctccatcctcccactacctttcccagcctctggtaaccatccttctctactatctctgagttcaactgttgcttccaaattttgcctattgtgaacagtgctgcaacaaacacggaagcgcaaatatctctttgatatgctgatttcctttcttttggatatatacccagcagtcagattgctggatcatatggtagctgtatttttagttttttgaggaactaaaaaccattctacatagtggttgtactaatttagattcccaccaacagtgtctgattaaatctttttgttgttgttttgagacagagtctcattctgtcacccaggctggagctcagtggcatggtcttggctcactgcaacctccgtctctcaggttcaagcaattctcatgccccagcctcccaagtggctgggactacaggcacacactaccacacccggttaattttttttttttttttttttttttttttttggtatttttagtagagatagggtttcgccatgttagccaggctggtctcaaactcctgcctgtgataatccatccacctactcctcccaaagtgctggtattacaggcatgagccacgatgcctggcgctaataagatcttaatatacccatttcacttaataagaaactgagactcaagaaaggaaagtaatttgccaaggttacacagtaaataagtaatagaataaaaaacatttattaaaattcaaaatctaagagacgggcaaatcacctgaggtcaggagttcaagaccatcctggccaacatggtgaaaccccgtttctacaaaaatacaaaaattagccgggcatgatggcaggtgtctattaatcccagctacttgggaagctgaggccagagaatcacttgaacctgggaggcagaggttgcagtgagcagagatcatgccattgcactccagcctgggcaacagagtgagacttcgtctccaaaaaaaaaaaaaaagaaaattcaaaatctaggtcaggcacagtggctcacgcctataatcccagcacattgggaggctgaggccagtggatcacctgaggtcaagagttcgagacctgcctggccaacatggtgaaaccccatctccactaaaattcaaaaatgtgccagacatggtggcgtgtgcctgtaatcccagctactcggaaggctgaggcaggagaatcacttgaacctgggaggcagagattgcagtgagccgagatcatgccactgcactctagcctgggtgacagagtgagactctgtctcaaaaaaatatatatatatattcaaaatctatcatcacagtattttcctggcctcagccttttcttaaaaacccacctaaggcatctttttccttcttcctgttatgacccatgacagagacaagagccacctgtacatagttgacctcaaacagctgaggaattcagtactagaaaaccaaataaattgcatcaagattctgattcttttattcaggcctaaatcaaagttcaagcctcaaattttgctaaaactgtatatatatttctgaattttcatattataaaataacagcttgaataaaaataggtgcctgactaaaaaatgtacaatagatggaatgtttgtgcaattactcaaataatcattccctcctaaattatactatgtcctattatgtatgtcaaggtatgtaaattactaaataataattttatcgcagcactaagttaaacactgcaaataccataaacatacagcaagatttaaatctggatcctgagaagctgggatgcctaatatgaactctgactactctgactaaaatccattaaattatatactattcatcaaaaactatatagtatgagaatatagctaaaacttctaaaagttatcagagagtttggtattaaacaaaggcaatctcaaaatttacacttttaacctagcctctctataattccttaacttcagtagattgattagaataggaaaaaaaagtactaagtaaaagcaagcaatgatagctgagaaacagagacactgatctgtattctttttttttatacttcaagttctagggtacatgtgcacaacatcattaaaaccaaagaaaaatgttatgctcagaatattcccatttgtgtatttctcccttttcctaactctcttcttaatcccaaatttaaaagactagttgtaaaacagtagggtgccaaattaaaacacattttattttcagatgtctccacactcacaggctgacttcctgtcaggaagagttccatttcattgaataccccaatcagcagggaacttgcagaattaagtgccagttgatattactttgttttgcatttaccacccttgagaataatgttcaaagatctagttatatagtcagcatggtatcatccttctgactagactgccaagccacagggtgtactgccagttccacaaaatttacctcaaaggttgtgttttctaaatcctagtgtgctggtgaatccataggacgcctgtatttcaggtcaaatcctgaatctaaagttaaattatgtttttctttggttgtaacagcacttttaaatcaatattatggaaactcaaataaagatcaattaatgctcaccaacccatcaacctattttatttttgaaaagaaaaaaaaagtactttactccgatttattttgtattaatgtttttgctattgtttcaagacaaatgtttccaccttataatagaaagttatctgttataaaattttgaatcaataaagcatgtttgcatatcagcaataaagtacagttattgagctgattttaaatattttaaaatagttcatgcatctaagtttttcatgaccaatttatatagcttgaatcttcacctaacctctccaactaccatagacttcctatccagtcctcacaagtctatacttccttcttttaaggtcaactgtttttactgcgcacaaaatgaattctgagcatttcagcaaagaatacctactttctcgggctttgtatattataagaacaaagcattcacagcagctctaaagcaaaacaatatgagtgtattagaagcctaccctattgattctcattccatctgcaatcaaaaggtcataggtagtaacaataacaaagctcagggacaatcaatttatatccactaattttttataagtacgttctaaggataagttacaaacacatcaagaaggaattaaaaattcctttttgaaattgaaattaaaatgtactgaaaccaacattttccaaacttatttaacactgtatattcttttcatggaacaatttcttttgagactgggtctgctcatgttgttgcccaggctggtctcaaactcctggcctcaggcaattctatgcttcagccccagtagcggggattacagttgcaaaccaccacactgggcagaacacctactattattatcacaaggtactcactgtggaatttgctgtattgaaaaagtcagatagtgagagttgatcaaacaagcacatggctaccacaatttcaaccaaggaaaattgttaatgtccgtttaaaattattatcttatattacaattatttgtctcgctcactaattgtctcttctactgcttaaggaataatagatgatagtttccttaaaggaaggggcttgtcttaaaagcatacgacacatgtttgctaaataaatgaataaataataccagaagcagacataaagaaaaggacttgggcaaggcagatatattcacacaaagctctgtagaagagacagcatttgaactgagcctgattgaccataaaactgaaaattctaaatgtacagaataatggcctcctcaaactgctatacaaaacttcgtatcataggatttccttataggtgaaagaaatgcataatgaagttaagaaggcttggccgggcgcggtggctcatgcctgtaatcccagcactttgggaggccgaggcaggtggatcacgagctcaggagatcgagaccatcctggctaacacagtgaaaccccgtctctactaaaaatacaaaaaaattagccaggtgtggtggtgggcgcctgtagtcccagctgctcgggaggctgaggcaggagaatggcatgaacccgggagatggaggttgcagtgagcagaaatcgcgccactgcactccagcctgggcgacagagcaaggctccatctcaaaaaaaaaaaaaaaaaaaaaaagaaggcttatttctattttgattaagcaaagcaactcatagtcaaaatttctattttttggttggcaaaaaataatcctttatttcattacctcaattatttctttgaaataaatacataattttcctaataccggatagtaagttttagttaaaaaaaaaaaaaaggttgaagcgtaccctaaacacagcacactatgaatagctaaccactccacttaaaagaaataaatttctatttatattaagttcagcagtaagtaaaactaatccacagtaatagaaatcaaatcactggcaacttgaggtgacagaggaggggattgattgaaaagaggcacagggaaatttgaggattaaaatggttgggtatatgtcaaaattcactgaacagtacacttaaaatgtgtgggtatttactgtatataaattatacctcaataaagttgacgttttttatttatttatttatttttgagacagggtcttcctctgtcacccagactggagtgcaccagtgcgaccctagctcactgtaacctcgaatctttgggctcaagcgatcctgctgcagcatccagagtagctaggtctacaggcacatgctaccaagttcagttaaatgtttttctttttggtagagatagggtcttgctatgttgcccaggctggtatcgaactcctggcctcaagcaatcctcccacctgggctaaattgttttttttaaaaaaagaggtctaggctaggggccgggcacagtggctcaggcctgtaatcccagcactttgggaggcctaggcgggcgaatcacctgaggtcaggagttcaagaccagcctggccaacatggtgaaaccccgtctctaataaaaatacaaaattagccaggcatggtggcaggcatctgtaatcccagctactcaggtggctgaggcaggagaatagcttgaacccaggaggcggaggttgcagtgagccaagaccacgccattgcactccagcctgggcgacaagagcgaaactccatctcaaacaaaaaaaaaaaagaaagaggtccaggctgacaaacataaggagaccctatctcaacaaaaaaatcaaaaaattagccatgtatgctggcatgtgcctgtagtcccagctacttgggaggctgaagcaggaggatcacttgagcctgggaggtcaaatgcagtggaccatgattgcaccactgaactccagcctgggcaacagagcaagaccccgtcttaaaaaaatgaggtgaatctgattaagtcacaagaaaatgaaaaaccaaaggccctgctcataaatgaacataactacactatttggtaatgataaaattagttgtcttaatgaaaatgaagatttaatataaaaactaattaatacaggaaagtatggaggtatttcctaatgaaaaagaccaaaagacaaagtccaaaatatggtgacttatgatccatgttaccattgatttatcaattatacaagtacataaacatttatatggttgaacagtactatactggacgctggggatacaatagaaaaaaaacacagtgcttgtcttcaagaaatttgcagtctacatggaagagaaaggaaaacaacaggcaacttaaatatagaatgaaattaactatgggtgagtgttctgcacaatacctcatttaggcgtagagttgtagggaagagagggtaaaggaaatctttccaaaagagattgtaatttatctaggagctagctaactgattcattttttccataaatattcactaagccataatgtgctaggtaccagaaatactttaatggacaaagcagaaatagctgttaccttcatagcatctagaaaacaaagaggaatactaacagtaaacaagtaaaccaattagcatatttatacttacaatttgtggtaaattctataattggtgctaagattaagacaaaaagataccaattatagatatgatcctcgaagaatgagataattaagctgagctctgaatgataagcagcagctaacaaaagtcaccaagttagaaagaggggcagcttagggaaagaaaaagcatgtaccaagacacagaaatataatggcatatttgggtatctttaaatagttcagcatggcttgagaataagtggtaagaaatgaggttcaggcattaagagagacctaaatggtaaaggacaccttgtgccatgtatggagctggtttgccttttttgggggtggtggaagagaggtattttaataatcttctcatactgaaaatattcatctataaaatcataactatagaaaagaatattaatatcatatattcagaaaaaataaactcaaaatggagaagaaacttgggattagagaaaagaaagtacagaagaacaaaaaataaagaaacgttttactgaagattcaggaaaaaaattcaaacataaaactgacataaaataatcataagaactatctcattcttattataaattattataattttaaaattaataattcagaggtacagaaagaaatacaagtcaaaaatgaccaaaccttatatcattaccttcatgtaaagaaaatatttcccaaaacagcaacaatctacatattttgttgaaaaattttttaaagaataatcagcctaaaatagtattttaaattaacttttgctgctaattaattactcagacaggatgccagtccagactacatggtgcttctagtttttctatatactgtatgcatttctgataaatgggaaaagaatagatgacctggcagaaggctcagacaataatatgtgatttacaggacaagaatgcagctaccacaagatttatctgacagccctctccgatagtggactgttgagtatccgaaggaatgatttctagtctacaaagtctactactgagtagccatacacattatttatttattagatgttttgggttgaaaccatttttaaatgatgcacttcacaatgcacagtcataaatttagctttaaacccaagaagggaggtagtgttattggaatgtatgtcagactgaattaggactagcaacacaacgcttttataaagtggccttgaatgcaacgtcaagtctttcaaaaatgatattaatgtcaaatgaacaagatacaaacactttatataatgctggagtaatattacttgaaacatttgcttaacattttctttaaattcatatatatttaaaacaggtttatacacatatacaacaaatttggcacacaagtaagttgcatgtttgtgaaaaaccacctgaaacacagttgagaacttgttcaatttttgtgtatttgcaacagagaacatacagtttcctgaagaatgtaagcagtcttattttaagaaataaagaggatttaaattgatctttggaacttcagtcattcttgaattattctacatgggattcaacagatgaataaatctatttttacaaacctcatattttaattatactcaaaaatataatgctgagtattatgagaggtttccaactctaattaataacattttgcctaaacaatattaacatttaaatagactaaaatatgaaatggtgcctaatcaactattatatatagcctaatcaactattggtaaatgagtggacattgaaaatgacaatcttagtcaaaacaaatatatagtgatctgtttggttttattgtcagctaaccaaatgtgatcatttcctcatttcttaaatttaggctctaaattctcttttacaaataaaatgcagttaaacaccttattaaaaataacacaaaaagaatataagttttgaatggattcaagaaaaataatcagagcatggctgattgtcatgaaattaacaccaactaatttgtaaagttctaaatcaaatttgcagatgttaagttcataagcatatcccattatttacgtgattaaaaagtagtttttgacctgatctttcgatctttggcactccgtcctctccatctcctcttaaaaaattaattaaaattttagcaagatggtagcttttgcttcccaccctatctcagaccaaaaaaaattatcaatcaaactcaagccatccccacccaggatctgtaaaatgtcgacttgaaattcaatttcatatctcttaagctttcatgtagaaaaagacagttcacttcttaacaaaataaatcacttttgtgattgccaagttgacctctttgaattaggaaaattcaaagtgaaaaatgtaattatcaccccagaacaatctgtatacatctggagctaattctagcttcatttttcacatcatttttcacactgtgctacatcttgtagagatgccatggaacttttgaagaactcacaaaaaatgttaaggacttcaaatacccaataatgtattttattcaaacaaaaaccttgacaatttctgacttgaaacttactgtactatatgatcttcatatcccatttgattgcattagtattaaacagtactgtgacatacatgataaataggcatattaaaacatgtcattctttatctttgcagctcctaacattaaaatatgcaatatactatattggaaatagcttccatgtaccaaaaatacattcgattcttctaaactagaaagtaaaacttcattgtgaaaattcacctatgaaataattatatcactatgaacaataaatttatattcttgtaaggaaacatccaaaaccataagaatgctcttttaaagtgagggcaatttcatgtagacataagaatgctatatggcaatttctatccaagaaagaaacaattatttctaatcaaatggcttaatgagaaattttatctagtcagcttttgaagaaatggagttttctaaatgagatgattaaattatagaacatgattctcagtaaatctaagaatcacaagcctactaagtaactacttctcacaagttcattacaaaaatccattaggtgtaatctctagaagtaattgttcttatcgcaccttattgacaatgcatagtattgatttttcacaccttctatgattctttaatttatattcatgaaatgtccatcagcacagtctaaataaatttggcatataggcactaaaacaaataaatcgatgcaaagaaacattaattttgcattatccttattcgttaggcaagtaaaccatgagagttgtaaatgaaggtcaaaggttttgaaatgggtcaaaacccttgacctctagaccaatacctttcctattaaaaaaggctattttaaagttttaagtgggggaatttactaccaccaagatatcactttaaaagactacaaagaaaactctcaataaaaacattcatctgtttaattgcaaaacagaaaagaaaacctcacaggatacatgatttttatataagttttttttaaaaaaatcattaaagtttaccacatgaggtacaaggttttggaacacctaaaataattttgctcttaggaatttattttctacatcttattatgatagctgccacatttttgttaatgttttcccaaatctactgtgcatgtcaaaaataattaccaatgacaaggattcaaaatcatttatcgctcattttataacctctgcacaaaatggaagtaaacccataattcccagtggagtcagcgtggcactccacaagatatagaaataaatctgtttttataaccttaatatatacagcaaagaaattatcaagatcatttgatctggacatttttaaagtgactctaaaaacttttgtttctcacttcctctcatgcttgcttcaaaattatctgcaagtatcaaaaataagaagtaatccttttgcaatacaaacaaaattattttaaaacagcaaactcacaattttattataccaaaaatttcagtaatgcaaatataaaatcccccatgaaaacaaattcatgtgataatctacttttaattcaacatttattcttgccactcacctgagaacacagtagcataaccaattccacaactgaactactcgacttcatgcaaaccagacctattttaaagagaattttaaaaaagaagttataaagaaaacaaatgaggatttgttacaatttcatccaaactgtttcttcaaattattttttcagactattaatagtgcacatttaatcacatgatcaaataaggtacactatagttagttcaaagctggcttcaaaactaccaccatttttgtaaagtatttcatttcagctttcaaaatactaaaacatttattacaacttcatatataatgacaattcacaatactcatagaaatgtgcacaacatatgccatattgatcaatatcatctacattttgttttggagagagttgatcgttatacatgcagagaagggaaatggctccctgacctttgctttctccactacactctctcccttcaaccctctagctatcaatcaagtttccattttgtttcatggcagcagacatcccaaacactcttattagtaccttgacctctgacctcacactaaaccttaacagaaatgcaagccgttgtctgttatatattcttgatttcttataaattaattcatttacttttatgtttcattttggttcaccaaaaatatctttagaatggatattttatataattaatacctatttaaagaagtctttggttttaattaccaataaaatataaagtagttcattagtatcttaacaaagcaatgccaataattaaagggactaaattattaaattgcattactagtaatcaaaaaaattacaatttttttattcgacatttttctaagcaaacacaggcttaggttccagggtataacatctaaaataattcctgatggctcttaaacatcctattgccttcttttttctcccgaagaaaactcttccaggtaccctatccattccctttgtctttttattctttagttctttctccttccccgtttaaatacgaatgcttccaacctaatgatagcgcatgttggcattttttagctttataaatagcattcaagttaaaagggctgttcacccccttcgttttttaaaaaatgttagaaccatttttctcaatgtctgaaaaaatatgtaacatagaaatgatggtaacagtgtcagcactggcaagaaaattagctatagaatgtctctatattgtattaggaagcaaattattaactacagtgtgatttctgtagggcgaagatgaacatggctcttcaggctaatgctgtcaaggccaaaagaaaaggcaagcaatactccctctcttactgcaggtgtagccctctgctggtctgaaaccttgccatttttccttaaatttaacccagataataaaagaagttcagttttgctccaacttcaaaacccattatttccagaaagtaaattcagatctttctattattaggtcattaatccttattgctttattcgagagaaactagaattcctgccattgggccctgatgggcccttttattatacatctcttcagataatgaaaaatagtaattttaaaaaagaccttaagctatccaaaattagggagatttataggtgctcctttgtccctcttaccacacttatcatatttcatacatatacatatatatatattttttgagacgttgtctcgctctgtcacccaggctggagtgcaatggcacgatctcagctcaccacaacctccacctcccaggttcaatcaattctcctgcctcagccacccgagtagctggaattacaggcgcccaccaccacacttggctaatttctgtagttttagtagagacggagtttcaccatgttggccacgctggtctcgaactcctgacctcaggtgattcgccaaccttggcctcccaaagtgctgggattacaggcgtgagccaccatacctggcccatatacctatatagtcttaagaaaaatttcacacatacacatttctgtttatttatttcagtcttattttccaataataaaggctaacaaaccagaagaaggttcatagctactttctagttggatatgaatattcaggaaaaaatatattcactgacaaagctagtaaaaggtcaaataacatttcatagttcggtttgaacaattaaggtggaggagagtgatggtagatgtattgcaggggcagggtggaaagtatgttcaattcgaatgagtaagggcttcagaaaacaagagagacctgataacagaccttaagttccctgtctaaaggacactggtactgtaaacacaaaaataacattgggagcaaagaaatagaggatagccccaataaggaacttaacatcaaaatgtagaacttacgtcacttctatttttgacctaaatttttgccaatggatgacactcatcacatgtgcaaaaaaacaaataataaacctgtaaatctctcttcagatttagtcatactctaagaacatccaaaggaaggccctaaaaccttaaagtcaagttgtaagttactgccagaactatcattttcattttatacacccacaaacacacacaccctattactgtctcaatcaaaagaaacgaagtactgcaagcttacagatttgaaccagctcacaatctgacctctctaaaactctcagtagaatagtagaataatagggtttggtttgattattttttggttggcttttcaaaggtagaaaatgttagtcttttcaaaaggacaaactcaggataccaagccaagagttttatatctgcactaatctggaattttatgatcaaagaccactgtaatttcttcagtggagactcacccagatatatcacttcagtgaaaggattaaatgactcaccagacagtaagccagtgccacctaaacccatcgatctatctaaatcctcaagtatacaatgaaaaaatagtcatgactatttactatctggaatataagagccctcttgttttttgtatttaagtcaccttaaataatttattttttaaaataggatggcaataaacattatgagaaactttaataagaatttaaggataataaactcaagaagttttactccatattttcctggttttgaaggtatatacatatactccaaatgagcattatcttttagataaaactaaatgctcatgatgaatctgaaacacaaccatcttgaaaacactaagtcgaaatttcaaatacatgtttaataggctctagcttatcataaattctggttttccttcctgaatttatatcatccaatccaacattttggaaaaattggatgactaaaaattttgttaaagaggacagacatcttctttgcttgagacttgcaaaatattttcttgtacagatttgcaaacatttagaataatcaatccactgaattttttatttccatataaacttttccttctagtcatcattgtatgcacacctgcctttagcatttatctacttagaaactgtatcaagtaaactgtggtacataatcatcccacaagacggaagaacaccgccacacgtctttttagaaaaatgggatggcccaggttcttgtctcaagttatcacacaaactaagcacaatgaagtccttcctgctaaataacatgctcatagagtgtacagagatactgtgaccctttggagggtcacaaaccattgtaatatctaagatattttttgcctaccccaaaaaaagtttttgccccattgagactgcaagtttatactttcttaaaacacagtgcaggcagagtgcagtggctcatgcctgtaatcccaacatcttgggaggccaaggcgggtggatcacttgaggccagaagttcaagaacagcctgggcaacgcagcaaaacccatctctataaataaataaataaataaataaataaataaataaataaataaatcaataaaattttttaaaacattagacgagcatggtgacatgcgcctgtagtcccaactacttgagaggctaaggtgggaggatcaactgagcccaggaagacaaggctgcagtgagccatgatcacaccattgcactccagtctgggtgtaggagtgagactcagtctcaaaaaaaaaaaaaaaaaaccacagtgcaaaattttgggtaaagcaatacaacgacagaggctaataaacaagagtaattatttcttttcctattgcaccatcactccaagtgcaattctagcattcgtgggttttttttttttaattttagtccacagcatagtaaagaatagctgatgtgtaatagtgaaatagcaaaatgtttcaagatacagaaaaaataagatcactaagactataattaatcatatttataaaaaggatccagtgaactcacatataataattgtaagacataatttaaaattttcaagcttgtgttctctttgttctttggaaaatctctttagaaaaattaatccttacaaagggttataactacttgaaaaagagggttaattaacatcattacaattgagacaatcaggctacaggtgattccaggcatgatgtaatatgaaatattacatctaatttaacttttagctttaacttcaagtcttcaaaatatacagggcatatggccagacgcagtggctcaggcctgtaatcccagcactttgggaggcaaggccggaggactgctcggggtcaggagtttgagatcagcctgggcaatgtggcgaaaccccatctctacaaaatatacaaaatttagccagcttggtggcacatgcctgtagtcacagctactagggagactgaggcacaagaattgcttgaactcgggaggcagaggttgcagtgagccaagatcgcaccactgcactccagcctgggtggcacggtgagactctgtctccaaaaaaaaaaaaaaaaaaaactaaaaacaaaaacaaaaacaaacaaaaaaaaaatatatatacacacacacacacacacacacacacatatatacacacacaaatatatatatgtctatataaacatatatatttcttaaagataaatatgggctgggtattagacgacattaagaaactattactattattaggtgtaatagcagcattgtgattatgtaagaaaatgtctttttttacatgctattaagtattcaagggttgaatgacatgacatctaagatagttttaaatatctaagatagttttaaatattaaagcaaaataaagggaagtagagatatcaaataattatggaaaaatgaatatggtttggatagctggtaataagttcatagatactatacttactacttttgtgaaaatttgaaattttcattaaaatatttttaatactaaaaaactcataagcatttttttaaaaattaagaagctttgtaatgtttggtcacacagctagtcactggcaaggacagaatgaaaaccaaagtctcctgccttttatattaatgctttttgtacagtattatgctgcttatacagtactatggcacaatcacctctttttaaatcctttctgttttacagtacatgaaaccacaatccaaaacattcctcacaacataaaatacataagttacataagaactcttagatttgtttgctatttttatgaacatcatcaatgaataggcactgctcaaatttatacatgagcaatagtacaccttcttccttcttacaattttaccaaaatttattggtaaaaaatcattctaaattaaattttgttcagggatatagaagtgtccattgctaatgcttctgggtatttaacatgatcctatcttgttatctgctataaaattcaaagaccaataagcaacaatgtcttgcaatactgagaggctgtatttaatacatacatcttactcactgtaataaaattaaacatagttcataagttgttacaccatttaaaaaaaaagtttcatatatgaaacataaattagggaaaagccctgaaatatagactcttcaatttttaaaattcaatttttttccaattatattacttcataagtaaaagtcattcattacttcatcaaatagttcatagctaaataaattatatccttcaatagatctaaggaaattgctattccaaacttaagtacttctaaaatctgaactttctttttcaaataaactcattgttactttttgactgcatgaaaataatatcgctcatcaccaactccatttacatctatagaagagatgaaattcctaactaaagcttcatatgtacctactgatattgtaagggtcaaacgaagtgctcatattgcacagttaatactcaaatatagatatcttaaactattagcctacctataaccttgcatttccattatatccttattgctacaagagagatgctttttcacaggtttttaaaaaattcctcagaccatctcctagctactgttagtcaacaaaagattacaataactaaagctgccagttgatacttaaagacactggaatacagatgggagtgtcattcccatgatttttcagtttgaggagaatacaagtatattatcctaaaccatcaatcacgggcccaaaaaaagccagatttagcaaccacctaatccaagcacttttgaatgcaaaaattaattctatatcatcatttataaaaagccctgtagcttcaccttaaaaaatcctagttatgaggtcaggtgcagtggctcacacctgtaatcccagcaactcagaaggccaaggtagggttcaatcttgccagtacactgcactccagcctacacaacaaagcaagactctgtctcttcaaaaacaaaataaaataaaaaataaatcctaggtacgaagatgaagattggtattttgaagtcagtctgataaactcttcaactcattatttaagaaattatcctctattgaactgcaatctgttttctgaggaaatttacggtaaatctactttcacttggttaagtcactctctctaatattcgaaggcactcactacatggcaatgctccatgcgcaaaaagaaaaaaaaaaggaaggaaggaaggcagaaggaaggaaggaaggaaggaaaggaaaggaaaggaaaaggagaaggaaaggagaaggaaacgagaaggaaaggaaaggaaaggagaaggaaaggaaaggaaaggaaaggaaaggaaaggaaaggaaaggaaaggaaaggagaaggagaaggaaagaaaaggaaaggaaaggaagggaagggaaaaggaaaggaaaggaagggaaaaggaaaggaagggaaaggaaaggaaaggaaaggaaggaaagggaaaggaaaggaaaggaaaggaaaggaaaggaaaggaaaggaaaggagaaggaggagaaagagaaggaaaggaaaaggaaaggaaaggaagggagaaggaaaggaaaggaaaggaaaggaaaggaaaggaaaggaaaggaaaggaaaggaaaggaaaagaaaggaaaggaaaggaaaggagaaggagaaggaaaggaaaggaaaggaagggagaaggaaaggaaaagaaacgaaaggaaaggaaaggagaaggagaaggaaaggacccattattcctcatccactccataaatagcatggtttccaatcccctcagcaacctacctcagcatgctatctagtttgacaatctcaaagtacactacctagaagagacccaggaatctatgaatgacgtaagcagtatagagtaaaatgctgttatctctatttgtaaaacagaattctacaaataacaatgcattccttatctgtgtggcaatacattgttgttcatatggatctaagttcaagtaaaatcctgtgacactagtctctccaattctttgctctcaaaattaattttaatgtatcaaaaaaaaaaaaaagtcttagttctttggttcaacacataattctacgctccatccaaatcactgataaaaatcttgaagattacaacataatagacatgtgacacagtcttcaaaagatagcctatgagaaaccttgtcaaaggctgacaacacttaaacaatgaaactccatgttatttcattatccatgtaagtttttaatcctgaaatataaatacatacaaataaaataaagaaaaaccacttacttgttccttctataagcagttcttgtccatggctacccaaaagtgtccgagaaagaaaaggtgcaaaatccacaaaaatctcacgaaggagaggagctgccttttccaaagcgtgttcaagcctctctgtaatactaaggaaaagacattaagttacttgaactattcaacagattgtatcaattttctagttttgaaaataaagatgtatttccatatatatatataattatttaaaaaaattaaaaatcacctaaagagacattactgctatgcatagcagtccttctgccaaaaatattcgtttttatcctgatctatcttgcccctacaatctccaacaaacaacctggttaacaaccactccaagcatcagtacttactacaagtctcacctggccagttaagagcagtttgtttttaggcccattataatctaaacaaactctcatcaagtcttcaacaaatttttctatttaccactaaaccattagcacactgagttcaagaaccatgacttcattttaaaattcacagttatagcatatagtatagactcaacagacgttgagtgcttataaattataaaaagcagttcttttttattgaagtcaattattcctttctaatgcaatgtgaatgatttttctcctgaaaataatatactttataggcacattataacaaaactatcatttggttgatagttatatttattaataaactgagatagttgtaaatgtacctataaatatataaaaatatattaatatatatttgtgattatatatacatgtattcatgtatacatacacagatacatttaatgagggttttttttttaaggtccccagcatttcagataattcacagatatccacagctttagtttctaacttacaaattaaacatatacataaagagccactagttatctactattaacactaggagtacttcctattcatactaccaagaagacagttgctactgaaactatcaacacaaacatatataaatttttgctgtgaataaccatctcctcacaggcactgctctaaatactattttcttccacacaactcatagaacttgttatccctgaagagtatcacaaatactagctatactcgaagcactcaagtacctacatttgtagtgtctaatggatttcccaattgtggtaaagaaaatcaaggactctctggacactaagtctccagtggtggaaaatacactcaaagcattcgaaattaaactctgaaacccaattaaacaaggtaagtaacaataaaaatctatctacaattcagtattattgtggctttggctgactggctatcacttatatcagcattttgttgttgttgttgttgttgttgttgttgttgttgagatggagtctcactctgtctcccaggctggagtgcagtggtgcgatctcggctcactgcagcctctgcctcccgggttcaagtgattctcctgcctcagcatcccgagtagctgggactaaaggtgtgcaccaccacacctagctaattttttttaatatttttagtagagatgagttttcaccatgttggccaggctgatcttgaactcctgacttcaagtaatccgcctgcctcagcctctcaaagtgctgggattacaggcgtgagccaccgcacctggcctatatcagtattttatagaggagaaacaacaaattccacactttcaatttgcaatcatttgaaagaaagtcataagcttatgtaaatatttgttatgcatgcagcaattatttttttaccacaaatagtcacttctcatgaagtgacttgtacatcatgaaatgacttgtacatcatcaaatgacttgtacatcttataatctttcaaaagaaaatgaacttctaaaatgttcccaagcctctaaatgtcatatatgttgaaagaaagaaatgaaatgaaatgaaatgaaacgaagtaaaataaacctagatagcttaaaaagtcatcaaaaggtataaatcacaatattcaagttagtagcttaaatacctcatatttgaaaccggatcttgtgaaactgaatcaactgttggaactgagggcaattttgcattagatgatctactgcctataaaagaaaaataaccatctataggaattttctgcttttagatatgaagatttaaataaaaagaatgtcattataccagtcaataaaagcattataacgtatttttatgtccattactatttggataacattaaaatctaacaattaacaactaaatgctttcatatataaacctcagctacaagctcaattatcatgccagagcaatctttctatccatgagctgaagaagcaagagaaaagtaaattctgactccctaaataaggttcacaattccttctactcaacaccaagtgtcaacagaaagttacaagtaaaagcattttcttaacatagcaaaaacacagaaacagctacattccaaatttagctttaaacctccattaccatgaaaactatccgtattcagttatcaaatcactactaaaggactaaattgtagcaataaatgtaatcagggttagaagcctagatctctgagaatctgtaatcttgtatcacaactattatcagttattttccccttatgccccaaatacaaaaacactatgctttaaagagaataagggccctctttcccaaagattgttgaatctttcagtccaaaagtgattagaaacacatcaaggaaagcatctgcatcaggctggaggttgtgttggcccagagaaagttattggagccagtgtgaggaggaaatccaaggaaaagagaaaactgagaattgtagaattcatatctatatgaattcatggttccaataaaggatggaaataatatgtgaatgacagtatatatttttatagacttttatatacaaacatacacacacacaaacacacacactgcctctagctctgtccactaagaggacacggaagcagcagcatcttaacacttggtgtccagatcttggtttctaaatactatactccactaaaagaaagaaatggctgattcaagatctgtgtaagaaaagcacaaaatgagtttgaaacatctagttatgctttgtagaaagcaaggaatgataagatatatacaaggaataaggttatgtcaaaggacaatgaagccagcttgaaggggctcccactgatcaaataccattgtactccatcctgggtaagaaagtgaaactccgtctcaaaaaaaagaattgccatttttggccaggtgcagtggctcacgccagtaatcccaacactttgggaggccaagacaggaggactgcttgagctcaggagttcaagattagcctgtgaaacacagcaatgcccgtctctactaaaaatacaacaaagtggccaggaatggttgtgtgtgcctgtggtcccagctaggtcccagctcaaggatcacttgagcctagagggcagaggttgcagtgtgccaagactgcactactgcattctagcctgagtgacaaagcaagaccctgtcttaaaatacgatacgatacgatacgatacgatacgatacgatacgatacgatacgatacgatacgatacgatacgatacgatacgatacttccctctgcttcacaccactcccagaacttcctcaagctcacttcaattgtatctaggaattctgattcaatgtgctctttttggtaaggcaaataaggttaattctggatatagataagcatagccaggacctaatcagaagatttgtggatataactgaataaaaaacagcaaggatctgaggcaattttgaactttcctgaaacatgcttggtttttaggcagtacttgatcaataaccctcagttctgattaccaggtctcagtcaaatctaaggatccaaaaatctagacaatttggccccccaacaagcttggttccttttggaaagcaggcaatgcagcaatcttccacaattaacctctggataattactgagcccaccccttagagtgagcacatacctagtacaaaatgaacttaactgtagttaatctttcttttccacaacatatttcctttcccattcccttgataatcaaagttgactttcctttatataccggaagttttgtattgcttacagtcctgccttcctcaccatcctgctcaactgagatctaactgtacctaaaaactctaaccaagtgactgttggtcaggacgcataggattcgtttaaaaatgaagctaaagcacacacttcatcatgctgacaattattttttatttttctttttttgagagagggtcttgctctctcacccaggctggagtgcagtggtgtgatcagagctcactgcagccttgaactcctggactcaagccgtcttcctgcctcagcctcccaagtagctgggaatataggtggatgccaccacacctggctattttctattttttttgtagagacagggtctcattatgttgcccaggcgggtctcgaactcttggtctcaagcaatcctttggccttggcctcccaaagtgcgagggttataggtgtgagtcaccatgcccagcccattgtgacaatttttaaaagcataaatatcaattcacatttcatcataaaaatattgctatttttgtgtttttcacaataaaatttcaaattagagggcaagaccagggaagttcaaaaacattttttcaccctttggtatctggcacttctaagagtcaggtccaatcctaaaatcatatacaacactcagtaaagtacttcacagacccaatggctttattaaactcagtaaatgacacctgcaattttctaagttcttgacaactatatgatcactgaatcacagtgggtcattgactgttaccagtgattaattaaatagttctgttttcttaattggtgatagtttttgaagaccatttttattgcaatgtatcagacattttctctattaggattattgatggattttcttgagcttttctgaagctaatacaaaggaacacataaggacccatttacttaaaagtagaaatggaaaaaataaatccctccccagaaaacatatgcatgaggctttaggaaaaaaaaaaaaagggggtgtgcatgaggctttaggcaaaattagtctttactgtgttaactggtttattgggttttttgttttttgttttaagagacgaggtcttgctctattgcccaggctggagtgtactggtgtgatcatagctcaccacagccctgagttcctggactcaagtaatcctcctgtctcagccttctgagtaggtgagattacaggcatgtaccaccacgttcagctaattttttttaatttcttgtagagataaggtctcactttgttgtccaggctagtcttgaactcctggcttcaggtgattcttccaccccagcctctcaaagtgctgggactacaggtgtaaatcaccacaccctgcccactgtgctaaatgatactaattttaatgagaaatgcatattagaaatgtgaaaaagaaaagcaacattgttacttctaaataaagcagtaacaaaaattatttcctcacactaccctagaagtaatgccaattttcaattctaaaagagaatatagcagaaagagattttttacagtgtcttaagtcataagaagacactttaccaacacggataataaattaaccagcaatagttataagaaaaaaatcacatgaaagaataaactaaatacaccagtaatttcacactaggttgtcctccattcctgctgtggaaaaaaatgtaatatccaaacacattctgtattttttcaactcaggtaaaaatataaactttcaatcaatttgttttaaattatcattaaatatttccagcaaatgatcacaaatacataaatgcagaagctacctcctacatgtggaatgatactcacttatcttttccttatcctagcactgataaactggctccttctaactgacagttttccagacattcaaaagaacaaaaaggaaaatgcaaatatatcatctgtctagcatctatctggggagtaggcaattgtttatttaaggtccctgcgggtctaaataactaatgtcccttgcaataaagaatcattaaaacaaatgccaatttttaacccctaaacactttagcactgcatttctctctctcttttctgaaccagttaattcagcctgggatagtctacatgcccagtaaaaactaattaaacaaatcctattgaatgaataaaaataagcctattggcctaaatcttacacaaagcaaagatggttatgactcaaatatttccctaatattaaaaaagtactaattaataatgtatatggctctgataaacagatactgtctaatattctagtaagtggtagaattactaaattttgcaaaatagcaaacaccaggcatataaattagtgaacagtatacttagttccactattgagctagtttcaattttgatttattcatttatgctttgcaatatagagaaacagcatattggaaaaagaataatgatattttaacatacaagaagggatatgggtgaaagtggaaggatcacttgaagccaggacttcaaggcttgtctgggcaatagaacaagactctgtctctacaaaaattttaaaattagccaggaatggtgacacacacctgtagttctggctacttgggaagctgaagcaggaggatcactcaagcccaggagttcaaggctgcagttgagctatgattgtgccactgcactccagcctgggaaacaaagacagaccctgtctcaattaaaaaaaaaaaaaaagaaagaaagaaagaaagaaaagaaaaaagaaaggatactgtattctaggtaatcagatctttgctgatgactataaaatttctagattttgatatatttactaaaatcactttcgcttttctttgaaaacatgcatatacaaggatatgccttatcctctgatgaatatcttttaatacttattaattagaagatacaattgttgctcttagactagtccttttggttgataaaatgctgcataagctaaggtatactattcaaattaaaatttgaaatttgaaatttgtacaccaaaaaagttttgtatgttaattacagtcttaataatgtatactatttcaaaatgcaaacaaattctcaatttttatgggttataaaatttttcagtgataatattttcatagaaaaagcttggacctcatataaagctggcaagttttaactctgtttctgtgattattatctatctagtactagtttctctttaattgtaccacatgtaaaatgtgtctcattttgatatcaaaatttccaaatatccacaaatgggaatttccttgaagatatcatgtgaatatataacagaaaatatgaatgtcacagaagaaacttcatattttctatcaagtaaattttttgcccaactgtaggataatgtaagtgttctgagcacatttaagatagggtagattaagctatgttgtttggtaagttaggtgcattaaatgcattttcaattttcaatattttcaccttacaatggtttatcatgatgtaaccccatcataagtcaaggagcatctatattctaagtcacaaatgcatttaacagagcctattttataagaaggtattggatatatcacataatttactaaatattgtattgaaagtgaaaaatagaatggtcatacggatacttgaggtacagtttttactgaatgtgtattgctttcacaccattataaagtcaaaaaattgttaagatggaaccatctatatatttatctacttattttaatggcagataacttaaatcgagagacccaccaaaaagaaaacaaaaatttaacagttaaaaaaatactgacaagggaaagagaactatttgggaggttggggtagtttccatgtgaaaatgagtactaacaagtacaagggcaagtatagtaggcaaaagcatgtaaagtggggcggcagaagagtaagaagcaggacaaccaaaaacactagattaggttagatttttcttatcaaggcagtaatgttcatggcatcaattaacggaataaaatagaagcaatacactgaaatagagaacccatatgacagtaacaagaacacagtgaaagaggaaaaagaagagtcagatgtggaaaccaaaacaaatggtaaacagaaagaccatcatcacaaggaagacttgaaataactgaaaaagcaataactgtttttttaaaaatggggggggctaaggaggggaaaaaagtttaaaattctagctcaagatggaaaaaaaaattggtaactatttgagaaactccatcacaaattatacaaaatttaaacaatagaaaaataagatacattatgagctggatcaatggtatagggttttgtagattttgccaataaatgtaacagtcttcaagatagcaaattgttttataattctgcatacagtttttcaaagtgaatattttaaattacaatgaatttattggaaaaaatacaatggtttcagagagaaatgtataatactgttacatgtaaaatattacccatatgtctcagctgtttcttatctcttctgaaaactccaagacttaaattttaaagaatagacttaaaagcaatcaaagggtcctatttcctctgttcctaaactgaaactagagggcagtataagaaaatattttactcaatgtactttgaatttctgaaactacatttgattttggatgttaatgaaaaatttactatacctgaatttaaaagacggcaggtaaatcatttcatagatattaataactattgcatttttcacaaaagggactactctagaaaaaccacagttgattctttttttttaaaggactttggatgggggtggagaagcggaaatgtgcatacccagctccaaatgaattaccaaattatttcttctccaaaggaaaaaaaaaaaagaggcatcagagtataatggaacaataaagatgaaaaatttgctagagtttcatgcccattttcctttgtaattctcactgggccaggggaaaccagcgagggagagaatgacagggtatttgagaattctctgtacttcaaactcaattttcctgtaaacttaaaactgatctaaaaaataaagtctattaatttttggaaaaaattataaaataaaaagcaaggcagacaaaactctgctaccatcgcagcttttggtttcaaactagaaaaaaaattctaatcactatttttcctaagaataaaaataatacaagactattaattaaatgttagaaatgccacctaaagtaaatttcgaaaatcaaaattgccagtagcccaacttcatggagatccaaatgacttcataatacactttcttgcttttaccatgtaaagaaggtagataagtcacttggttgtaattatacagtacgtaaagaattgcatataactttcttttacttaacctactggaacattttctctattcactaaatactataaaatttgtaaaaaaattaaatacatttaaaacttcttataaaatgtatttttgttaacacaagcacaataacaaataaaagagaagacaaaagaaataaacatagtatttgtttctaggatacatgattacatagtacacatcaaggaaaaaaattcccagctactggccagtagcaatatcaagtttggaacaaaactctccaagatatgctaatttgccaaataaaggtggaacagcagaatagaaggcaaaccctggcctgagatatcccaaaagaagtaacggcattatttctgatctcaatataatccaccaggccattccttcaaaattcctttattttccgtcaatctcaacctagaatcataagatgagtgttttggtaggtacaatatcttgttattaactttaagaaacagcaaaatatccagaagaaaaccactgatacagtaacatcccttttgttatacttggtcattttaatactgcacattcttcacattattcaagtttacccagtatcaccattaagcttcccatcaatgtataggatcttgcatccatatatatgcttttatacatggaaataattttttatccatatatatgcttttaaacatggaaagaatgtagaaggagagatggacaaaaataaaagtgctataggaggaaatgaaccagtatgaccattgttagaatgatgctacacttcagagcagcattcctttccaagcctctaattcaaaaaaatatgccaaaaaaaacaaagtattggacactatataaatattttttttttgtacagtccaaaatatttgacaaccagtaaccacattaaaagattacatgtcaacaagactttcttatttaggccactatctatatacatcttcttaagtgcagggaaagaaaataaaggaaaaaaatatttttatgaatctatcattcatccatgcactcatctacccaactagcagcatctaatctaccacacactactaggtttgagtggagaaaatagtgaaatccttgacttaatttcttttaattttactcaaatttattcagaaaagtagtaaacaatcaacagtataaaagtacaatggtttctaatgtgcccccaaattttaagttaatcaaaaatcttaagcgttgctaaaatgagatctaaaaacatttttgttgaaatcactgataactaactcacctggtgattctcctcccatatctgaggcttgggctgaatctactgaggaaaccacactgacagcattggtaggtatgcttgtattaaaggtggaaggtgagactgctgacttttttgctgcaacaatgacacttctgtaataaagaaagtaaacagactgaaagatacaaattgatctcttgaattaattacatgaatttcaaaacagaaactaggtagctaacttatttttctaattttctttcttatttctatttgatgtacaatttagacttttcacccaacatgaaatatcttcaatactgtccatatttatctgcatttcactatgaaaatataataatctatttaacatttaagcttatatttaccacatagtatttttaaaatttaggatcatcttaattatctaacaaataaaatataaccaaaagtattaaagcagaaaattcaacgtttccacaagaattgtaaagcactgctaatctgaaataataaaaccttagaaatcttataagcttaaaaaaaaaaagcagatataagcaatttgctaacatgtatacaacccagtttttcatttttaaaccccaaagactatatcttttgataatatataaaaaagcaatgcataggaataaaaaccatacgcaaaaatatcaaatagtcaaagttctttatcttgtatattattcaaacacaggtatttatgatataccaatttcaattaaaatgtaatactttataccaaacagtaagtaaaagaccttgttaggcataacttaaaaggcatttttaattgaagttggctccataaacatgcaaaaactcagttaatgaggtaaagaggacagctgatatataatgcactcccacagcagtgcttacttttaattacctggtgttaaccataagcccaaagtcttcaacattcaatttatttaatcacatcttttgttgacagtactataactgcgagcttcaagtattcccttaatagctttaaagtattcagcttctaaacaaagtaacttaggtatttgatccctatacatgcattcaaaagtgaaaattatgtaattccaatattttaataatacatttttgtagttatttttaaaaacacacacacaaagcaaaataggtttcgttttacctcagtgcctatcatgtgagggcaaacactgttgccaattaaatcaaggtctcttgtgctaggcatggcttattcaatgtacttcagggtagctggtgtcacatcattataagggtgactgccaatgttaactatacactaaaaaatagaagcaacagccacctgagcccccaatccaaaatggtgtgcttaaatcacagcagcttatatcagatgaagattattgacttaagggggagtagatatgacgaatgtctgtgtgtgtgtgtgtgtgtgtgtgtgtgtgtgcgtgcacgaatgtgtgtgtgtacgtatgtattagtggtaccttcaaaaacaacgcaaaatgtaatttttgtatttcctactggagggagaaatttaaaacccattgcttaagaaaatcactgtcttctaccaatgtttttgcaggggagggaggagaaatatgaagaatttactttcacatttgttcacaaaagaaagaaccagcaagatctagtttactcatactgtaagtagggactgaattgagcaatagaaaagaatacttagaaaagtgcaattgctttttctataatcaaaatgtaagatatatacccatctatgctatgactcaacaattccacttctaggaatttcctcaagaaagcttatgtccacaaaacatgtatacagtaatggtcatacaggctttatttataatagtcaaaaactggaaatagcccaaatgtcctttatgcagatatagtaaatttttaatggtgctatgcttctagaatggaatattattcagcaataaaaggtaacaaactactgatgaatgaaatgaaaaggtaacaaacaacatggatgaatctcaaaagcattatgttgaatgaagtcttatactaaggagtatatactttatgggttttttttttttaacatgcatgtctagaacagacaaaactaatttatggtagaaaaaaatcagaataattgcctctgggggataggaacaggaattggctgggaaagagaactttcaagaccaatgatatcatgatggggacttaaggttacacaagtgtataaatttgtcaaaactcatcaaatggtacacttaagacctgtgtctttcattgtatgtaaattttagctcaaaaaaaaaaactgtattcatctccagttagagagctgcatgctggctgaaatatttaagagtgaagtgaactgatgtctacaactttgaagtacattacaaaaataagattgattgatggatacatggtgaagcaaacagagctaaaagctaattgttgaatctcagtgatgggtctacaggtgttcactgtgcaattctttcaacttttctgtatgcctgaacattttcataataaaacactggaaaactggtaacagaacagaatttactacagctgttccaaatatgcacaatccctatttattcaagatgacatagctaattaaacacaacaaaagaactcaacttcatttctaatcctctagcctcttgctgttaatgtttcagtcacaaataagatcttattcttttattcagttcagtaaatatttattgtccaagatctttcacctattgtcaggaatgatagatcagaagtacggctttctacatgaatttacattttacatgttcctcacacacttcttcaacatgctcttatggttgctaagcgtgttgtgtcatttcacaactccaacccttcgtatatatgcctcctctgccaagatgctttcttcttaatcctgcttgcttgttaggtaatataaaattataaattctaatagcagctaagataaatgcactgacaatatgccaacaattattattcaattctcaaaacaatcctaaggtacatattaattcaatttttagaaattttaaataaaaacctcagaaaggtaaagtaataaccaaagtaaatggtagaactaccatggaaatctaggtttatctaacagcagagccttgaatttgaaccgtttccccatgttgacctttcttaaaacttcagagatataattcacataccatttaattcactaaaaatatacagttaagagatttttggtatgctcacaaagttgtatatttatcaccacaatcatattaacatttaaacataattttagaatcatctataatcaacagcaataaagatctctaacatataaaattatttatatactaccataaaatcacaaaaatacatctgctcataaatttttaaaagctgaattatttcatatagctacataattagtatataatagagaaataaaatcaatttccaaattcgctgactgattcaaatcaattctaaggaattaacataacattgcttcagcttaaggctacacaaaatcaaagaaaaatcaaagttacaatgatccaattaaaaggacactaagcagtaggtagattttgaaatattttcattgtctttaccaatcattgtcattattactataaagtttcagtgtaaaagactaaaatcttcaacagagatctttaacctatcgtgtttatgttgttaaatataagtataaatctaaattagtaaagcatgttccacagttaacaaaaataatctagaattttaaacttaccaatagttaagattgatcatgcaaaaactaagcatttaatattacctttttatacaatgcattggaaaacacagaggaaaatgcaatatgcatttgacaaaactgagactttacatgacagacaatgtgctagggatatttctggcatctttctcaggctacagcttaagtttctatttaagaaacaaattgaaatcttttttaatgtttaagaacaattattggaactttttatatctacatcaattttagcagaaagtgcttcaaactttttagcataaggaatctgaaagatagacaaccaattatgcaagctggtttcccaaattgtcaattataaaccaaatattaaaagagataaaaattgttcttattatcatttttttctttatgaactcactatgaatacttaatatttgtggggcaccgtgcttaagaacatacacaaattatcatatttaatttatgacaacccttgagattagtagtacatattattatgctaattttacaaatgagaaagaagtaattttcctaaagtaccacacagaacaaatgaaaatactgttgctggattttttttttcccctgaacaagggatactcatttcaaagtttcttttaatttactggcaataggcaaatagcaacaatgccttcccgatcaataaagttgagaacttccatttcagtattatatcagtttcaaatatcacaaaccctcacacaaatgctattttacttaacatgcaaatagttcactaaaggaaaaaagagcatttcagcctaccacttcagtccctaaggatccagttgaaaagccaaaccagtccttgaactttatcaagataaatccctggcattcactaatcatcagagaggatcttcaaattagataagaacaagaattttggcatgggaatgaacacaaacacctttgcattcacaaaggcccacaacctggcagcctttcagcaaggttttattcatgtagctgttactctaaactttccagctattccttggaagttgataatacttaagatatgaggagagttgtgatttctgacatagcattcctgagataaatacatgatcagagggatgctttgaaattcccaaagatattccactagcccaaggcagcatgaaagtttttacaaaggggtctctaaataagaaaaaaaaagagggtaaaaaacagagcagtttccttgccatcagagactgttaaatgaatactagacatgttaaattctacagaacatcctggaaaatgctaccatcaaaattatctgttgttttctatttcaataaaccccttaaaatgtattacacctaagcatgatttcctaaatatgttcatgatctactcactgaagacatcagtaaggcacaaatttaatttctacactattttaaaaagaaataaatgctaaaatacataaaattttgatcattagtaaacaatgtaactatattaacatatattaaatttaaaagtatagcctcacatatttctgggtactcaatctaacactaacaaatctaaataaattataaaaattgagaatagacagggcacagtggctcacgcctggaatcccaatgctttgggaggacaatgcagcaggatcgcttgaggtcaggagttcagcaccagcctgggcaacagagcaacacctcatctctacaaaaaattttttaaatagctggacatgttggtcccagctactcaggggactgaggaagaacgatcccttgatcccatgagtttgaggctgcagtgagctatgactgccactgcactccagcctgggtggcagagcaagacaccgtctcaaaaataaaataaataaataaaaattgaagccaggcgcagtggctgatgcctgtaatctcaacactttggatcacttgaggccaggagtttgagaccagcctggccaacatggtgaaacctcatctctactaaaaatacaaagactagctgggcatggtggcacacatcagtaatcacagcttaaaccggtaagcacagtgttataaacacaaactagttctatttttagttgcctcgggaacctccaaactgtttcccatagtggttgtagtaattacactcccaccaacagtatatgaaggttcccttatctccacatccttgccaacatttgttactgcttatcttttggatataagcgattttaactggagtgagatgatatctcattgttttgatttgcatttttctgatcaatgatgttgagcatcttgtcataaaatcatttgacatttctatgtcttctttgagaaatgtctattgagatctttagcccattttaaggttatcatttcgtttaaaatgtagtaatatttttaaattattattaatacatttcttcctatagagttggttgagtcccttatatattctgattattagaacccttgtcagttaaccagaattataagtttattatataatccccagtctgtgggttgtctcttcaatttgttgattgttttctctgctatgcataagttctgtagcttgatgtgatctcatctgtccatgtttgctttgactgcctgtgcttttggggtattactcgagaaatctccccagattaatgtcctggagagtttttccaatgattttttttcagtagtttcatagtttcaggtcatagatttaagtctttaatccattttgaactgatttttgtatatagtaagagataaaggtattcattcttctgcatatggatatacactttactcagtaccactgagaagactgtcctttccccattgcatgttcttggcacctttgtcaaaaatgagttcacttgtagacgtgtggatttatttgagttctctattctattccattggtctatgtatctgtttttatgacagtatcatgctgttttggttaccatagctctgtagtataatttgaagttttgttctctttgctcaggatagctttggctattctgagtctctgtggttccatatagtttctaggaatattttttctatttctgtgaagaatgtcactggtattttgatatggattgcactgaatctgtagattgctttgggtagcatgaacattttaacactattaattcttccaatccatgaatatgaaatatctttcattttgggggtcctttttagtttttgcatcaatgttttatagttgtcactgagggatctttcacttctttggctgtttattcctaggtattttacttatagctattgtaaattggattactttcttgatctctttttcagattgttcactgttagcatatagaaatgatactaatttttgtatgctaatttttgtcatgcaactgtactgaatttatcagttataatagttttttatggactctttaggtttttctaaatactctaaatacaagatcatatcatctgcaaacaactgacatcttcctttccaatttaaatgccatttctttctcttgtctgattgctttacctaggacctccagtactgtgttgagtaacagtaatgaaagtgggcatcgttgtctcattccagattttagagaaaaggctttcagtttttctctgttccatatgatactagctgtggatctgttctttatggctttttattgtgttatgttccctctatatgcagttttttaagggtttttatcatgaaggaatagtgaattttatcaaatgcttttcagcagcaattgaaatgatcatatggcttttgtcttccatcctgttgatatgatgtatcacactgatagtttgtgtatgctcagacattcttgcatccccagaataaatcccactcattatgcatcaatttttaaaaagtttctttgagacaagttctccctctgtcacccaggctggagtgcagtggcatgaacacagctcactgtagtgtcaaactcctgggctccagtgatcctcccgcctcagcctcctgagtagctgagactacaggcacacatcaccatgcccagctaatctttttgttttaaaatctcaccgtgttgcccaggctagtctcaaattcctggactcaagcaatcctcccacctcagcccacaaaatgctggaattgcaggtgtgagtcactgcacccagacaaaaaaaaaaaattcataaaatgaaaaatctcagaagacacaaaaataagttaaaatatatcaaaacttacaaacacaaacacttagaaatagtacatggtaccatctacagttaaaagaaatgtaaacaatgtaaatttcaattattaaagcataactgtataaaattaacattaatgcatactgtactactgtaataatttcatagctacttcctgccacaattgcattgagcattggtattgttagcatcacttaaaatgctgtgtgacactagtcatctcagagcacgcagttcatctctttttatggggcagggggggaaggagttttgctcttgttgcccaggctggagtgcaatgctgcagttttggctcactgcaacctccacctcccaggttcaagcgattctcctgcctctgcctcccaaatagctgggattacaggcacccgccaccacgcgtagataatttttttgtatttttagtagaggtggggtttcaccatgttggccgggctggtcttgaactgctgatctcaaatgatccacccgcctcagcctcccaaagtactgggaagtttgtctctccagtaaactgtgtatcacggtaaaagtgctctctcccagttctcatatatttttcatcatgtttactgcaatattataaacctttgataacataatgggacccatacaaagtgccactagcaatactggacatgctcccaagcagcagggaaaagtcatgacattataagaaaaagttgaattgcttgatatgtactgtagattgaggtctgtagctatggttgcctgccatttccaaagaaattaatcccgcataagaactattgtaaagaaaaggaagttggcaaagttgtcactgcagtgacaccaggaggcaaaaaaacaaacaaacaaaaaaacaaaacaaaaaaaacttgcactttttgtgaaatatctttatcttgcactgaaaatgcagcttttatgtgggtacaggattgttataagaaaggcatacctatagactctaacatgatttgagaaaaactgaagtcattatatgtcaaatttaagtaaaaaagaatctaaggctagatttaatgccagcaaaggatgatcaagataacaggagaagcagcttctgccaaccaagaggcaacagatgagttcctagacatcaagaaaatcatttagaagaaaggaccagcccagtcaggtttttaatgcagacaaacgtaacctatttgggatgggggggaagccacaaaggatatttattagcaaggaagagaagtgagcactaggatttatggcaggaagagataggctaactctactgttttgtgcaaatgcagttgggtttatgatcatgactgcccttatctattaatataaagctgctaacccctgagccttgaaaggaaaacacaaacaccagctgcaagtctgttggttgtacaagaaggcctggacaaaaagaatcctttttctggattggttctattgatactttgtccctaaagtcaggaagtaccttatcagtaagagattaacttttaaagttcttttacaattggacaatgctcctgaccacccagagcttcatgagttcaacactgagggtgttgaagtggtctaactgccctcaaacgcaacttctctaattcagcctctagaacaggaggtcacaaggacctttatggttcattacacatggcattcttaggaaacaactgtcaacactatggaagagaacccaacagaacatcgtgaaagtctagaaggattataccactgaggatcactgttacagaaaaagctgtggaaaccatcaagtttgaaacaataaattcctcctagagaagactgtgtttctaggtgttgtgcatgactccacaggatttctgacagaactaatcaaggaaatcatgagagactatagatatgacaaaaaggtgaggggtgaagggtttcaagatatgaatctcagagaaattcaagaactaacagataccacaagaacagaaggatcaacagagggaaaacaatttgacggagacaagaacatccaaaccactattagatgaggaagacatagaagaagcagtaccagaaaatgaactgacattagacaatctggcagaagggttctaatgattcaagactgcttttaacttcttttatgacattcacccttctatgatacaggcactgaaactaaagcaaatggtgaaagaagggtttgtaccacatagaaacatttttagacaaataaaaaagcaaaaaggtcagaaagaaattccagtgcatttctgtaaatttacaccaagtgtgtctgcctctcctgcttcccctttcactttctccaactctgctacctcaactgcccctgagatactaaaatcaacctcttctcttcctcctcctcagcatactcaacatgaagacaagaaagatgaagatctttatgatgattcgcttcacctgatgaacagtaatatatttttttcttccttatgatttctttttttttctttttttttttttagacagagtttcgctcttcttgcccaggctggagtgcaatggtgcgatctcagctcattgcaaccactgcccctcctgggttcaagcgattctcctgcctcagcctctggagtagcctggattacaggcacaccccaccatgcccagctaatttttgtatttttagtagagactgggtttcaccatgttggtcaggctggtctcgaactcctgacctcaggtgatccacacacttcaacctcccaaaatgctgggattacagatgtgagccactgcacctggccttccttatgattttcttaataacatgttctttttttctagcttaccttactgtaagattacagtatataatacatataacaatcaaaatatgtgtgaatcaactgtttatgttatcagtaaagtttctgatcaacataagctattggtagttaagttctgagggagtgaaaagttatatgtggattttcggctacacagggcgtcatcatccctaacccccatgttgttcaagggtcagatgtagaaacataccaaaacgaaaaactattatcagtacctgtcaaaagatctgaactgcacgggttgttccacagatagatcaccaagggctccaaggcaggctggtggcagaagggcaggatccactgtgactccatctgctggtatgttaaccaagcttcggagaatgtctttcacattgacgttttttgaaactgaaactgacggtgtagccttagtgtccaagtcatttcctctatcatttttggtttccggagacttattgacttctaaagaaagagtagatagcacctcgctgattgcatctgggcctgcactgacaccaggaggtgctgtgtgaggagttacttccacatggcttcctaaaccagtggctgtttcttccccaatgcctgagtccctccttcgagcagatgatgtgctttcagattcttccactgatgccgtagttaaagtgctgaatgctgctggtgtgatttctatatcatacccagaaacacaagaaataaacaaacaaaagtttagaactaatttttaaaaggtatattctgttttaatagctatctactgttttgaattatgaaatacatcatgttctaaaaaagcaaaaactaattacgtattctacagaatgtactgagtgggtgcacctattatcaagacagatggtataataaaataaataataaaatacttgcaaaaatgatctaaagtaatgggtagcaacacaaggttgaaagtcattggcctgtaagaaaaagtctataatcttttttgggggtgtgtgtgtgtgtgtgtgtgtgtgtgtgtgtgtgtgtgtgtcagtctgttgcccaggctgaagtgcagtggtgtgacctaggctcactgcagccttgacctcctgggctcaggcgatcctcccacctaagcctctcaagtagctgagactacaggtatgtgctaccacgtctggctaatttttctatttttttgtagagatgaggtttcaccatgttgcccaggctggtctcaaactcctgagctcaagcaatctacctgcctcggcctcccaaagtgctaggattataggcatgcaccaccatgcctggcccaagtccgcaatctttaggataaaataaaaagctctacctcaaacatggttactgcagctggaaaacttgttaccccttctacgtgcataaataattcaatgatccttaaaatccagttcaacaaggaacacctccttttctctcttttaattctcactccctttaatcagggtttcaacccattctagcaaaaatagtcttatcaaggtcaccaaaaaatctgcatcttgctaactccaatggtcagtgttcagtcctaataggacttcacataacagcaacagctgattattccctccaactagacaatgcttcctttcctcggctttcaggacaccattctctttttgttttccttgtactacttcactgactgttccttcttaacatccttcacctctttttctccctgatttcttaagttggagggacacaaggttcagtccttgttcctcttatgttctctgtctgcatttagtcccttcgtggtatcattcattctccaagttttaaataccactatatttccccaccaaaaaactcaaactattaaatataactgctaccctacaacttatcttacatgtctaaaaaaacctctcaaactcaacatgctgaaaactgaatttcttctctttttatctttccctgaaaatctctttcacctttaatctactccactgtaccttgtaatcatttttgactacctttttcattcacaaaatgcacacctaatgttttaaaattctgttttttctaccactaaaacatattcagaatctgactgcctctcaccatctctagttaccaacctaatccaacccaccataacctcttgcctggattactgattactgcaatatcctccttcctaactgttgtggaagagggttgttttaataatcctactgccccatgtctcctggtatgcatcccttgacaagcccttgaatctggactaggcttgactgacaataacccacaggatctggcaaaagcagcagtgggccagtatttggcccacgttttaaggtctggcagctcttgcattcccagaatctctgaacatctctgtaagaagtgtggcttatttctgatctaccttgctggaaagaacatgtagagagacgatatggagacagagatgctctccaaactaatgaaggaaaccaggaactcagttgagaacaagtatcaaggctgcagacacacaaccccagctcagctgttttagtcagtcagtctcagctcttggagccatcccacctgaggcactatatatactattagaaaagtcatcttagattttccagacccagcaaacatcatctgaaacagggataaaccatgcccaccgtgccctatccaaatctaactcaagaaatcatgaaggaaagattaaaatggttatggtcttaggacactaagtgcagggtaaggtattaaacagcagtacccagccaaaaacactgattatccttgccctctacgctatatcctctacacagaatacagagttacttttttttttttttttttttttggaaacggagtctcactctgtcacccaggctggagttgttgtggtgggatctctgctcactgcaacctctgcctcccaagttcaagcgattctcctgcctcagcttcctaagtagctgggattacaggcacccaccaccatgcctggctaattttttgtatttttagtagagatagggttttaccatgttggccaggatggtctccaactcctgacctcaagtgatccagctgcctcggcttcccaaagtgctgggattactggcgtgaactaccaagcccagcccagaggtactttttaaaacataaattgtaactcctgtactcaagaccctccaatgagttctcatttccctcaaagagaaatccatacccaattactcctggtcattcctgatatttttaccatctttattactttctttttttttttttttagcactttcaccaccttctaaaatactacacaatctacttatagcatgtagatattttctatctcctcccattagaatataagctccataaggaaacagattttttgttttgttttagtcatgaatatatacccaagtatccagtagatattgaatgaatatcgagtgaataataaattgcctcctttgggtggtagctacttctataattgcaacagctacttaactaactatacttttataactggaagctacttttaatactccaattattgcagttacttgttaacaagtctgtctcttagaatatgagttagtgattcttcacagcaaatgaagtcaataaaatttttcaactctttttgtataacattttctgacttacatttaattagttcatttaaagaacaaaaaatatcccaattgcaattaattacattatatttaagccacaacttttagttaataataaaaatatatgtatgctctcccttaatttgcacagaaatggatttaaattccaatatcaatattttaaccatcaaaagtaagtaacatttatttgaactttggtacaaaggaatagaaaatgcaaacttaccagagagtgatacattctcattttcactgccagtttctgtacatgactggctatgcctttcattttggggttccaaaatgtctctgtacttggagaccataagaacagagataaagtatactactgccaaggctaaaaattgagcttgtttgctatcctcctgggaaaaaaaattaaaggagttgattatgtaaccataaaataacatcattatattttacatcacaatgtttaaatacaaaacatgttcacaaatctttcaatatacacagaaaatacattacctacgtaaataataaatttattaataaacttacttgagcaaacattaggcaaagactcttagaaaaatgtctttaaatgagaagctttatacttgcaaaacatggaaagagagaagttagctcatttttttaaattattcaatctaaagacgtatgtcctaatatacattataatgttaatcaaacaaacagtaattataattatatgaaaacaggtcagatgcagtggctcacacctgtaatcccagtactttgggggccaaaccaggcggatcacttgaggtcaggaatttgagaccagcctggccaacatagtgaaaccccatctctactaaaaatacaaaaattagccaggtgtggtggcacatgcctgtaatcccagctactcaggagcctgaggtgggagaatggcttgaacccaggaggcagaggttgcagtgagctgagatcgcatcactgcactcaagcctgggcgacagagtgagtgagactctatctcaatcaagcaatcaatcaataaataaataaacaatgatatgaggataactggttatttttatctgtaatcataaaaactaaaatacataaaatatcacaataaaagtgccaaaaaataaacatgcagaagaaaaaaactgaagctattagatacagaataggatgccaaaggaattccttcttttttttgagacagggccccactccattgctcaggctggagtacaatgacacaatcatagctcactgtacccttgaactcccatgctcaagagatcttcctgcctcagcctcacaagtagctaggactacaagaatacaccaccacatccagctaatttttgttttttaatttcttgaagagacagggtcttgttatgtagctcaggctggtctcgaactcttggcctcgagcaatcctcctgccttagcctcccaaagcactgggattataggtgtgagctcccacacctgaccacaaaggaattcttgagagtatttaaaatagtacaaacaattatatatcaagatttaaaaaaaaaggatctatgagaaagaagacaaactagactgacctcttgaagggcctaggctccattctagctctacaggtcacctatatatcactgacctctttatcttgtcaaattccccatcttcaaggagaacctacacacaccactattctactaactttcccaaatatgtttgaacttgttaatttaaagaaaaaactcaaatttatctatcaaattctgaaaaccaaaggctcaagcagaaggtaaatttaaaataagaacatgaagaacactgttccctatcagataaatccaggcataccatggagataccacaggtttagttccggaccactgcaataaagtggctatcacaataaagtgagtcacacaaatattttagtttccgagtgtatataaaagttacgtttacactatactgtaatctattaattgtacaacagcattgtatctaaaaaaaacgcacataatttaaaaatattttatagcttaaaaatgctaacaattatctgaactttcagtgagtcacaatctttttgctagtggaaggttgcatctccacattcatggatgtcgactgatgggtgagggtggtaactgtagcaatctcttaaaataagacaagaaactttgccacattaactgaatctttctttcacaaaagatttttctgtagcaagcaacgctgtttcatagcattttactcacaggattggagtcattcctctgaaaccctacaaaggttttatcaaatacatttaggtaatattctaaatcctttgttatcatttcaacaatgttcacagtatcttcatcatgaatggattccattgtaggaaaccaatttctttgattatccataggaagcaactcttcattcgttggagtattatcatgacattgtaggaattcaatcacatgtttaggctctgcttctcattctgattctcttgctatttccaccacatcagcagtgacttcctccatggaaatcatgaactcctaaaagtcatccatgagaattgtaatcaatttcttccaaactcctattaacattgatatgttgatttcttcccatgaatcacatgggtacttcatggtatctacaatagtgaatcaattccagaagattttccatttactttgcccagatccatcaaaggaattactatctatagcagctacagcctgataaaatgtatgtcttaaataataagaagtatttcttaaatagtaagtcaaaatgactcttaatccatgaactgcagaatgaatatttcactaaaaagcatgaaaataacatgaatctccttgtatatctgatcagagctgttgggtgaccaggttgattatcaatgagcagtaataatttgaaaagactcttttcttctgaacagcaggtctcactagtggccttaaaacattcagtaagccatgtcgtaagcagatgcgctcttatctaggctttgtccttccttttatagagcacaggcagagtagatttataataattcttaagggtccgaggattttcagaatgataattgtgcattggctttaacttaaagtcaccagctgtattagtccctaacaagagaatcagcctgtcctttgtaacactgaagccaggcattgacttcctggtagctaggaacattgtaggatggtatcttcttccaataaaaggtgttttggcttttgttgccattgcttttggtgttttagacatgaagtccttgcccatgcctgtgtcctgaatggtactgcctaggttttcttctagggtttttatggttttaggtcttacatttaagtctttgatccatcttgaattaatgcttgtataaggtgtaaggaagggatccagtttcagctttctacatatggctagctagttttcccagcaccatttattaaatagggaatcctttccccatttcttgtttttgtcaggtttgtcgaagatcagatagttgtagatgtgtggtgttatttctgaggcctctgttctgttccgttggtctatatctctgttttcataccagtaccatgctgttttggttactgtagccttatagtatagcttgaagtcaggtagtgtgatgcctccagctttgttcttttggcttaagattacattggaaatgcaggctcttttttggttccatatgaactttaaagtagttttatccaattctgtgaagaaagtcattggtagcctgatggggatggcaatgaatctataaattaccttgggcagtatggccattttcatgatattgattcttcctatccatgagcatggaatgtttttccatttgtttgtgtcctcttttatttcgctgagcagtgatttgtagttctccttgaagaggtccttcacatctcttgtaagttggattcctaggtattttattttttttgaagcaattgtgaatgggagttcactcatgatttggctgtttgtctgttattggtgtataggaatgtttgtgatttttgcacattgattttgtatcctgagactttgctgaagttgcttatcagcttaaggagattttgggctgagatgatggggttttctaaatatacaatcatgtcatctgcaaacagggacaatttgacttcctcttttcctaattgaataccctttctttctttctcctgacggattgccctggccagaacttccaacactatgttgaataagagtggtgagagagggcatcgctttcttgtgccagttttcaaagggaatgcttccagttttgcccattcagtatgatattggctgtgagtttgtcataaatagctcttattattttgagatacgtcccatcaatacctaatttatacagagtttttagcatgaagcgctgttgaattttgtcaatggccttttctgcatctattgagacaatcacgtagtttttgtcgttggttctgtttatatgctggattacgtttattgatttccatatgttgaaccagccttgcatcccagggatgaagcccacttgatcatggtggataagctttttgatgtgctgctggattcggtttgccagtattttagtgaggatttttgcatcgatgttcatcagggatattggtctaaaattctctttttttgttgtgtctctgccaggctttggtaacaggatgatgctggcctcataaaatgagttagggaggattccctctttttctattgattggaatagtttcagaaggaatggtaccagctcctccttgcacctcgggtggaattcagctgtgaatccatctggtcctggactttttttggttgttaggctattaattattgcctcaatttcagagcctgctattggtctcttcagggattcaacttcttcctggtttagtcttgggagggtgtccaggaatttatccatttcttctagattttctaatttatttgcatagaggtgtttatagtattctctgatggtaatttgtatttctgtgggattggtggtgatatcccctttatcattttatattgagtcattcgattcttctctcttttcttctttattagtcttgctagtggcctatcaattttgttgatctttccaaaaaaccagctcctggattcattgattttttgaagggttttttgtgtctctatctccttcagttctactctgatcttagttatttcttgccttctgctagcttttgaatctgtttgctcttgcttctctaattattttaattgtgatgttagggtgtcaattttagatctttcctgctttctcttgtgggcatttagtgctataaatttccctctacacactgctttaaatgtgtcccagagattctggtatgttgtgtctttgttctcattggtttcaaagaacatctttatttctgccttcattttgttatgtacccagtagtcattcaggagcaggttgctcagtttccatgtagttgagtggttttgagtgagtttcttaatcctgagttctagtttgattgcactgtggtcggagagatggtttgttataatttctgttcttttacatttgctgaggagtgctttacttccaactatgtggtcaattttggaataagtgcgacgtggtgctgagaagaatgattattctgttgatttggggtggagagttctgtagatgtctattaggtccacttggtgcagagctgagttcaattcctgggtatccttgttaaccttctgtctcgttgatctgtctaatgttgacggtggggtgtgaaagtctcccattattattgtgtgggagtctaagtctctttctaggtctctaaggacttgctttatgaacctgggtactcctgtattgggtgcatatatatttaggatagttagctcttcttgttgaattgatccctttaccattatgtaatggccttgtctcttttgatctttgttggtttaaagtctgttttatcagagactaggattgcaacccctgcctttttttgttttccatttgcttggtagatcttcctccatctctttattttcagcctatgtgtgtctctgcatgtgagatgggtctcctgaatacagcacactgatgggtcttgactctttacccaatttgccagtctgtgtcttttaattggagcatttagcccatttacatttaaagttaatattgttatgtgtgaatttgatcctgtcattatgatgttagctggttattttgctcattagttgatgcagtttcttcctagcatcgatggtctttacaatttggcatgtttttgcagtggctggtactggttgttcctttccatgtttagtgcttccttcaggagctcttgtagggcaggcctggtggtgacaaatctctcagcatttacttgtctgtaaaggattttatttctccttcacttatgaagcttagtttggctggatatgaaattctgggttgaaaattcgtttctttaagaatgttgaatattggcccccactctcttctggcttgtagagtttctgccaagagatccgctcttagtctgatgagcttccctttgtgggtaacccgatctttctctctggctgcccttaacattttttccttcatttcaactttggtgaatttcacaattatgtgtcttggagttgctcttctcgaggagtatgtttgtgatgttctctgtatttccttaatttgaatgttggcctgccttgctaggttgggcaagtcctcctggataatatactgcagagtgttttccagcttggtaccactctccccatcactttcaggtacaccaatcagacgtagatttggtcttttcacatagtcccatatttcttggaggcttcgttcatttctctttactcttttttctctaaacttctcttctcacttcatttcattcatttgatcttcaatcactgacaccctttcttccagttgatcaaattggctactgaagcttgtgcatttgtcacgtagtacttgtgccatggttttcagctccatcaggtcctttaaggacttctctacactggttattctagtttgccattcgtctaatcttttttcaaggttttcatagcttcttttggatgggttcaaacttcctcctttagctcagagaagtctgaccatctgaagctttcttctctcaactcgtcaaagtcattctctgtacagctttgttccattgctggcaaggagtggcgttcctttggagggggagaggtgctctgattttttgaattttcaaatgggatctatttaaactgaagagcttctgtacagcaaaagaaactatcatcagagtgaacaggcaacctacagaatgggagaaaatttttgctatctactcatctgacaaagggctaatatccagaatctacaaataactcaaacaaatttacaagaaaaaaacaaccccatcaaaaagtgggcgaaggagatgaacagacaattctcaaaagaagatatttatgcagccaacagacacatgaaaaaatgctcatcatcactggccatcagagaaatgcaaatcaagaccacaatgagataccatctcacaccggtttgaatggcgatcattaaaaagtcaggaaacaacaggtgctggagaggatgtggagaaaaaggaacacttttacagtgttggtgggactgtaaactagttcaaccattgtgaagacagtgtggcgattcctcagggatctagaactacaaataccatttggcccagccatcccattactgggtatatactcaaaggattataaatcatgctgctataaagacacatgcacacgtatgttcactgcaggactattcacaatagcaaagacttggaaccaatccaaatgtccatcaatgatagactggattaagaaaatgtggcacatatacaccatggaatactatgcagccataaaaaaggatgagtttatatcctttgtagggacatggatgaagctggaaaccatcattctcagcaaactattgcaaggacaaaaaaccaaacactgcatcttctcactcataggtgggaattgaacaatgagaacacttggacacaggaaggggaacatcacacaccagggcctgtcatggggcggggttaggggagagggatagcattagaagatatacctaatgtaaatgacaagttaatgggtgcagcacaccaacatggcacatggatacatatgtaacaaacctgcacgttgtgcacatgtaccctagaacttaaagtattaaaaaaaaaaaaaggtgttttgtccacattgaaaatctgttgcctagtgtagacaccttcatcaatttcttagctagctcttctgcacctattgcttcaccttgtacttttctgttatggagacagcttcttttcttaaattttatgaaccaacctctggtagcttcacttttcttctgcagcttcctcacttctctcggcctttacagaattgaagagcgttggagccttatctgaaataggctttggcctaagtgtgcctggttggatcttttatacagaccactaaaactttcttcaaatcaacagtataaagccgttttacttcttatcagtcatttgctcactggagtaatcgtttacttttaatttcctttaagaactttgcatttgccttcacaacttggctaaatgtttggcacaagaagcccagcttttggcctgtatcagcttttgatatatcatcttcactaagcttaatcatttctagctttttatttaaagtgagagacatgcaacttttcctttctcttgaacccttagaggccactgtagggctgtaattggtctcatttcaatattgttgtgtttcaggaaatagagagacagggtaaaggcccctcccaaggagatggggagagacaggaatggccagtttgtagcacagtcagacatttattaagttcactgtcttaaatgggtgtggtttgtggtgccccaagacaattacaatagtaataccaaagatcactgatgacagatcagcatgacagataaataataataatgaaaaggtttgaaatattgtaagaattaccaatatatgacataaagacataaagtacatgctgttggataaatggcatggatagactagttcaacacagagttgccaaaaaccatcaatttgtaaaaaatccagtaatcggcaacatgcaatagcaaagcacagtaaaatgaggcatgcctgtaaatagaaactaatggtaaaaatgagactaattgttaatacttaatgtcaaaaattttggatataatcagtttcagaaaaatagaagataggctcaatttgaacatatccacttgatgcaattctttgacatatttgtgatccgtgatctgacaaaatctatgatattttgcaggttcatatgtaatgacttcttagtctgttggaaaaaacaaaggtacatttgtcttttttataaaccaccccttttctctagacatacccatgttcttctgccacacaattctgccatgttataataactgctgctaatgatattaatattcaaaatgcaagcaaataatttacttgttcttaacttcttagtctgttataaattagttatgccaatctaaatccttatttagcccattaatatgttcaatgtttactaactaccacatgaagtttacagtatatgcctgatttttggcctcaaataaaaaatatcccataaatcgtttacatttaaatcctaactcaagaaatagatttgctttccattgtagctgtcatttattgaatacttaccgtaggccaggcactgtgctatgtatttcatacatatttttattagcaaacttgaacaagataaggcttagagaagcaacttacttaaggacatatagtatgtaaaaaagcaaatctgaactcagattatggtgattaaaaaccttagctctttacctcaaggtagaaatttatttatgtcgtcgatcttaggtcatttccctttttttttctttttattttttaaatttttttattttattttttgagacagagtcttgctctgtcgcccaggctggactgcagtggtgtgacctgggctcactgcaagctccgcctcccgagttcacgccattctcccgcctcagcctcccgagtagctgggactacaggcacccacaaccatgcccagctaattctgcttttgtatttttagtagagatggggattcaccatgttagccaggatggtctccatctcctggccttgtgatccacctgcctcagcctcccaaagtgctgggattacaggtgtgagccaccgcacccacccagtgatttcctttttcatcataggttccttttgttccctaaagagactaaactctagcatgtaaaatatagtgttttcttttttctaaaactcctataaggtgattatataacttttataattacaaaacacttaaaattatttatgactttcagtaatcatatagtaaaggagatattctaattgtttgcagaatattgtaatataataactggttagaaggttcttcaagagccagatcatccagaggcactgtgaagagtttggattccatttaaccactaaaagatgatattagagaattctgaaagaaaaagagtaacatcatctattctagtttatttgtttgtttatgagacagggtcttgctgtgtcacacaggctgtagtgacacaatcatagctcacggtaaccttgacctcctaggctcaagcgatcctccccacctcagcctcccaagtagctaggactagaggcgtgtgctaccacatgtggctaattctattctagatttttaaggatcattctaggaaatataaagttatggacaatagactcagaacctgcccaatggaaaaaaagtgaacagaggagaaaacagcaacatttggtcctcaaactgaccacattcaaaggattccagggagaaaaaaagttgatggcttcttaattaaaggaataataacagctactagagaactatgatctaagaaggtagtatagccttttagttaagatcaaaatttcaagaatcagattccctaagtcctaaactcactttcacctcttactaattgtataatcttaagcacattacttaaatattgctaactccctcatagaattattgtgagaattaaacacacatatacagcattggtccccaacctttttggcacaagggactagtttcatagaagacaatttttcaatggacctgtagggggtaagaggcggggtgggggtagggggcatggtttcaggatgattcaagtgcattacatttataattagattttcataaggagcgcacaaccaagatccatcgcatgcacagttcacaatagggttcgtgctcctatgagagtctaatgctcctgcccatctgaccaggaggcggagcttggcttcactcctcaccctttgctcacctcacctcctgctgtgcagcctaagtgcaggtcagtggtctgggggttggggacccctgataagagcatccagtatcatgtttaatacacagtaagtattcaatactattaagtagtgataatactccaaattctacatatgcataaaaacctagtcaagaactaaagagaataaaactattgaaaaaaagggaggggaaaaagaaaaattgaggttagaaagtttgtaagaaatatatatgtaaaacatacagtaagtgttcaacaaatatttactaatgataatattccaaatgctgatgagtgcaattataaattatttttactttcatctttatactttctatatgactttaaattgtctacataagaattagcaatgttttctatcaaaatcagctgaaacaaaactgtttttcaactttaaaaaattagaaacaccaaactgagagcaacatttcatcatgcacctttttatcacattagtgtacctttgaggaaaaaatatccaatattcagtaaaataatatgccattcagaagttgaacattttattacattcagagcatcaattttagaattaagactgctgggtttgaatcctgattttatcattgtttatcaacactagcttggagatgttactcaagctttatgtgccttagattattcatctataaaatggaaattacaatagtacagctcaataagttgttggacttaattaatacatgtatatcacttagactgcttactatgtaataatgcattattccttttaatatcactatgctgatctgctagctcgctttatataaactatcttttctaatattctgtttctaaaatcattgtcaaaagaagtcgtttctagacctttctatctctgctccactatttgatatcacaaagaatttttaatctcaatacattaggcctaagaggaaatatgcatcagttaagagagtatgtgaaagacatattgtaacttactatgtctctgaaaacaactgccctaagccgattaatatccatgtcctgtagaagcctgtcaagatctcttactggagatataccgccagtcacaatgtccactgggctctatttaagattaaaaaaaaattgtatatatatatattcatatatacattacacagatattctttaaaaataaacacagtattcccagaaccagaaaagcaaagctatagcattcctttccccactttttttgtgtgtatgcttccttcttctttgaggggttggggagagaggtggagaaagatggcatgcaggaaaaaatgacatatttgaaggaaaaggcatcacagaaacaatcaaagtaaacactgggaaaagcagagaggtttaaatataaacaaatctttattgtgtatttaaacacaaatatttgaatgttatatgcaggcctaaagtaactattttaatctctgccagatttatttaactttatgttgaaatgaacaaataaaaatcttaattgtaaaataggagtatgctttttgaaaattaattaatctgtatacttaccttcgctgcagatttccctaaaggaataaggctatgcattggtttcaaggctttatctcccctagttttcagttgtgaatgctgttgacactccaagcaattccttactgcgactgcacaaactgtaatttattttaaggaaaagatagggaaagaaaagttaatatttaagattatggaagtgaaaaacatcaactacacaatatgatttacataagattttattcaaaacagacgacattcagcttattcctaaaatgtccctagactttatcgcctagtgttggttgtctgatattgttagcttccatgctgtggcccagttaagatttagggaggcagtatggcctagtggtctaaacgtttagggtttgctgaaaggaaatcagttcaggaatcttaacaataggctactatttcttagatctcaactaagctagctgggacaatctttagttaagaaaaggatagggaagaaaagaattgaaagaaatggaagaaaacagggaacaaagtacattaccatgaactagtcgaggtaacaatcttctattaccatcattaaagtaaattagttaaactggaaactttgatgttcttcttatattgcatcattacagcatgatattaattgagactaatagaggatatagcttttgaaagaagctttatagggtccagcatttactagctttcattaaaactgcttagaaaatgggagacaggaaagggaatttgattaatatacagtctaaaattacctaaggctcccacgaatcaggcagttagattacttagaaattaattttggattttaaatgatgaattacattatgtacccttcactatgaattgcttgataccatgtaatcatctaaattccctccaaatctgtagcactcaaggtacttgaactgagcaaaggagggagagcaaattaggaacaaaatagcaaacttaaggggggacttcacaaagaatcactggcctatcacatggctagcaggcatgagaatttagaaagaaagtgttctgaaaggtgcccaaagagagcaataaaagttgaaagaaaggaaggagggaacaagaggagggaagagagaatatggaatacagctttgtcaaatttgctatcagacccaagaaatattttactttatcaaatttgctatcagacccaggaaatacttttcatacaaactttttcacaagttgcataaaatcaaatttgagtctgtattacaaagttaaaaatcacacctcatttcctggtttcaatcagttactcttactgctgtcatcctaacttctaactccaacctcaggaaacaagaatgaggacaccagtgtccatcaacagataactagataaagaaactgtggtacatatacgcaatgaaataatattcagccgtaaaaaagaaagaaatcatgtcttttgcagcaatatagatggaactggagatcattatcttaagtgaaacaagtcagacacagagagacaaatattgtatgttctcacttataagtgggagctaaatagtgtgtacacatggaagtagagtgcgtaatgattgaaaatggagactcaggccagcggtgggggctcacatctgtaatcccagcactttgggaggccgaggcggggggatcacaaggtcaggagatcgagaccatgctggtcaacatggtgaaaccccgtctctactaaaaatgcaaagaattagccgggtgtggtggggcacacctgtagtcccagctactcaggaggctgagatagggcaattgcttgaacccggaagaaagaggttgcagtgagcccagatcttgccactgcactccagcctggcgacagagtaaggctccatctccaaaaaaaaaaaaagaaagaaaatggagactcagaactcagaaggatgagggggtgaggggggtctgatgatgagaaattatttaatggtacaatgtgtgttattcatgtgatgaataccctaaaagctctaacttcaccactaagcaatccatgtatgtaacaaaattgcacttgtaccccataaatttacacaaatacaatttaaaaaaaagatatcacacatttggactgttactttgtttaccatactctattaaatgatcttggacaagtcattttttaagtcccatttccatatataagaacagatggtactggggtggattaaattatctcttaattcttttccgtggctatgaaaaactaggaacatagagtatttccctagcctctgaatctgatgattcttgagtaaggctttgctagtatagccttgcacttttacttctagaaatgtactctttctaggaaagtgaaaagccttcgaaaatggcacacataaagcaataaagtctaaatattttaattataatactaatagattaaagaagtatactacaatagaaagagtaggagcactagttagacaaaagtatagtattcaaattctaccttcaccaattatagctttttagctatagataagtttcccaatttcttttatcttcaatttcctcatgaataaaaagaacaaaattgtcaccgtgaaaatcaacaatgacaaatgacaatagtcaataaatgataacttttattttgttatgcttacaattagaatgtctcttaaattttaaaacaactgtctataaattgttattccaagttacttagaatagcaagatataccattgattattaaatataaaatacttggaattttacatttaaactaatactattaaatactttgaatagcattttgagtaaaaattatacttgtggcaaaaagcacaggtatacattagtttatgtaacagacattcttgctaaatatgaaaaaatatgtcattaactacattttccacttccatgttatgttttcataggtgctttatctcttcatatgaccatggctcctaatggtttgcttccatttcttgtgccttctctcctcaccaccttctcttcacttaataatcaaatcatttaacaaagtctcgatatttacaactatatagaaggaaaattatgcaaaaaagggtttttttgttttgttttttgcttcacctaagaagtccagttaacattaaaaagtcatttcatgtatttttacttttacttagggaagaagtgtttccaggagaagaacagagatttcatgattttattaactgcattaacaaattaccacagcttttttgaataaaggctgtacttgaatgatgctagtttagaacgttgttattccagtgtgtttgtaagaaaagcagcatcaacatcacctgggacttggtagtcaattttaggccttaccctagacctctataaccctttttttttttgagacagagtcccgctcaattgcccaggctgcagtgcagtggtgtgatcttggctcactgcaatctccaacttccaggttcaagcgattctgctgcctcagcctcccaagtagctgggattataagcgtgcaccaccacacctggttaatttttgtatttttagtaaagacggggtttcaccatgttggccaggctggtcttgaactcctgacctcaggggatccacccactttggcctcccaaagagctgggattacaggtgtgagccaccaccccagcctagacctatataatctaatctgcattttaacaagatcatcaaatttatgaatcaccttgtgttttttaatcaccttaagtttatgtatctccttaaaatttcagaagcactactttagagcaaaaagagataggggagcacctctaattccagctactaggaaggataaggaggcgggatcacttgagcccaggattttgacaccagccttggcaagaaagcagaaccaccatttcagggagaaaaaagaaaaaaaaaaaaaaaaaagataggggagagtggaaactcctgaccaaaatcaccttagtaaatttttcaaaatacatcctccttcttgcccatccaacttaccaactactactatgtacattaaaaaaagtaaccatatgacaaattagctaacatatattttctcaccaacagaagacggataattttcaatgtcatctctgaattactgaaaaattttttttagtaaattcccaacggtttttagcagctcacctagtcggagacactgccgcaaaattcctccagatgacatacttttttcagcttcaatttcagtaaagccaagagaacttgcaaatataagcacatccacaaggctaattagcctctgcaaaaatgtcacagaggcttctattgaaaggccttgagtaggttcaatattttccagttcatgctgtaaagaataaagtttgacatttatatatatatattctgaaaaaaaaattttaccagatatagtcctaaaatttataaattgcataagtagtcagactttcagaaacctagtaacacagagtgatttatacttattatttcatctaaaaagggtgggggatgaggaggagcaacagaaccatacaggtgaaacatcatgaaccacattcttcactagctgactcatacttagggaatcaacattcttttaagttctttcattactagaacagattctaaggtcctctcaagtaaaagatcctattgttttttatttatagcacctacgatgcatagtaaccaccacatttaagttttagtcaataaagttgcataacactcatgttttcacaccaattttctatagtaattaagtccttactgtagccgatgtagcagctgaaagcaatggcagtatacccccacaagccatgaccatattgtccatcacttgagagatgagatgaattgtgttgtgtacaaagatgacattatcactgctattcacgaagtccataactgtctttgttgaatggctgtccaaagataaatgatatttactgataaagctaaagaaaggaaatcacagtttgcctacttgaggggaggaaagataagaaggtgcttttgcttcatcttgaaaactgaaggaagatgatgcagcaggcatttggagggtgtatacttcttcagaagaaacagaccattccatatcagtagttactatccatgccctccttcagtgctgaaacataaatactattcattttacactggatataaaaagttgaagaaaattatccttactgggaacaaaactaagaaatcatgtgacaaaaattaggaggtaaatactggtaaatgtgctattaaaaatgaattttcttctgtaatgcctataaaatgcttttaaacataacaagaatcttacacaaataaaaaaaaataaattaggtcactttaaaatcataaatcatacaatgggggataacttgaagtacacagattttttttaatgctaaaaatacattggaaatattgataatgttataacaattttttttttttttttgagacagagtctcgctctgtcgcccaggccggagtgcagtggcgtggtctcagctcactgcaagcgccacctcccgggttcacaccattctcctacctcagcctcctgagtagctgggactacagacgcccgccaccactcccagctaatttttttgtatttttagtagagacagggtttcaccgtgttagccaggatggtctcgacctcctgaccttatgatccgcctgcatcggcctcccaaagtgctgggattacaggcttgagcaactgcgcccggcctataccaattattttttaatacttctagtaataaaccaacttgataaacctaccttctggtgaattccgtgccataaaattgctacaggaaatctactacaaatttttttaaaagagaaacctctgcttttcacatttttgtaatccagataaggattccattcttataatggagaataaaagtgaattcagtaaaaccctaccatagaataatttctattctactttttaaccaaatgtctgaaattaattacaaactgtttctatggatttctttgaaaataaagactaggtttatacacatcttccataataaacatatagacaaaccttctccacatctgtatatctgtttctattgaaaataatagatcagtgagcaaacgttgatgcatctgagaccagttgaactcaggaatacgaaacacagtagatctggaatccctcctttgtccattaactgcatctggtgctattccttgccctggctgctcatgttgccttgatatctaatacagaaatttaaaaagtaataaaataggttcaacttcagcaggaggctttagcaaagtaaataatttagtagcttctatgcaattcatctaacacgtttttaagacactataagaaccaaattagagaaagaaaaattatcaatgagtaataacattaacattttagtacatgtaagcaaagctatcaaaagtgcaaaactaccacaatttaaaagtaattaacttggaaccatgttaagtattaccactatgtagcattttataaaagaatcaagtaacagttcttagtttttagccttagcctaaaagaaaggcagtatttagaatctaagtggcatttggattatgaagtggctagaatgaagaataaaaacagagataacataatgaagaaccaaccaacaaaaacaaaaaaaaggagggtgggacagaggataagaattgaataaagtggaaaatgacaacatgctaccaagcactgtctcatgggtcactctgagatatggacagaggagaaggctgtgcctctagatctcacaaagcctcctctctcttatagacttcataatacaattttaaatcacatgcttagtaactaaaattatacactggcaggtaggtagccctagagtttgttggaaaactaatgtactaggattgggttagtcaaataaaaggtaaaatgcaagtgtttccaatatttgttttataaactaaaattataccaatccttcaaagtggtaacttctggtgatactatggtaaaaatagtaataaaaactgtcatttaatgaactcacattaactgccaaacactgtgctaatgatctgaaatacaatcttcacattcattgcatttatttagttgtgaatagcatgtgaaccaaattcaaaataaaataaaatttaagtatatacacttgctcttttttaactcagtgcaaaagtacttgaataagacaatatataaaatcacctcaagcacatgtcgatgaggttgaggtgcttccacgttgggactggccttcaactccagcctctcagtatctgtagcaacattggaaacatccaacttcgcaatcttttgctcagaagaagcctcagagacactaccatgacaatcattaattaatttggtttctctagtgaggttagttgctttcttcccttcctccagcatctgaccaaggtctgattctacagctatttgggaaacagtagtttctggtgacatagctgaagaccctgatgctgtcatagtctgaattccagaatctttagaatcttgagtttcagtatcagtttgcttttcagtaacaggttttccttcttgaaatattaatttgtcatcattaccaaacatgtccagtttttcaccggcttcagatgcagctggagacaaactgttatcttggagctctgtgggtagattagcttcctcagtaggactgccttctactttcagttccacataatcatcatcttcctcttcctctactatagatttatccaagaattctggcatctctgaggcatcctcttctgaaggagaacttatagaagcagttacttcactgacagtcattgaatctttgccagttgttataaaagaattagaggaaatagccacagcttctattatgtcagaagatacttctaaatcatctgcattccttgtctcatttgtcagtgtttcttccaaagtgccttcatctggtaactcctgattttcttgctcagctttcatttcttcataagatgtattagtagtttgcagttcaatattagatgcagattctagtgaacttgtcttctctatacttgaattttcattaccatttgtggtgaaatgaggacagacaggagaatccttcgtatctggttgctgggatcctactgaaacattaatatcccttctaatgccagaggctgcttgaactgaagttgaagaacacagccctatttcttcatcaacttttccttgctgttccctaaatatattggcaaggttttctttgtgtatttcaaaagtgacctaggtgaaaaatgtacaatcagttaaaatatgcatgagaaatgaagacagaatacaaaatataaaactaaataattttcaaatacatagtttatataatacaataaaacttaattttcctatattttattttagtagaatgataaatgtaagtcaatcacagaaatctaaatattcattaaaaactacagccaattttaatgttaacaagtaacacagcatgaaaccacaagaagaacataattatttagcctattattaaacatgtataggaaaaggatacactattctactggccaccataacttgtaccagaatttaagtatgtaccattgggaagtgctttatgcactggataacacttgtttcaaccgctatgaataccaatttccccaggacttgtccgcaggagagattaaaaatatcaattaattatgctcaccattacagtagctctacagatatctattaagctacaaaaccattatctcactaagccaatgaatacaaattcttttagcaatgggagaaaaaagatccagcccttcccccaaaggttaaccataatttccaaagtttgaactggtcgaaaatagtctgaatgtttcagttgatccatccatacatccattcattccatttatatctgagtgactacaatatattaggcaccgtgaacattcctatatcatgctttgccttttacccaaatgggaaaaaactgaaaaagtaaatttttttttaaagagagtgctgtacttgttaatgtcacaagatttagaatttttaaaatctaaggattatcttatagccaccatcatatgatttccattggtgtttcaatggtaacccccatcaccccttgcaacaaaaatgccagaaaaacctataacacatgcagaaagtattagcctaattatagtttattaatcccaaaagtgtttgtttctgtaatctacattattatatagagtaaactgaacattcattcaataaatctttattgagccatagtataagaggatgataggacaatcaaggaagaaaagctgatttttttatccacaaaaatcaataggccttattgaatcacaagagtatacacacagatgaaaagcaaacaaaagtaaaaatgactctcaatgcaaaaatttccttctatcgacattaactcgcctttactcatgacatatacagaacattcatgccatgtgatatacctaaaaataaaaatgttcagggaatgaatattttcctgtgaatatttgtatttttcctaattgtaactatttccacattgtaactatgttcttaattctaaaacttagaaatctttttataatatttcaacaataaatgcatgtattcctcactaaacagtaaaatgacataatcacattaacaaaatatcaatttcttttacattcacaatgccaatattttatttgacatgggttctgtattttaattgaccaattcctcatattcattcaacaaaaatttactgaacatcggtagcaggccaggcattgtgtgatgaacacattgttcctgacttcatggagcttatattctaaagaaggtgtcagaaaataaacacacgaatatgtaagataatgtcaaatagtaataagagctttgaagggagggggaagtacagagtgaagaactgttctgaaagtctaggcgagaaggtgtatttactagtgtaactgcagtaggcctctctgttctatttgaacaaaggcaagaataaaagagagagcaagccatgtaaaaagaaaagagtttcaggcagagaagaacaaatgcaaaggccttggagctgaaataagcttggtatgtatgatgaataacaataaagcaataaactgagaactaaagaaaatgaggtcaaagatgtggccacgagctagattatgattgtagaacattatagactgtattaaagactgtattttattctgagagagccatttgagaattaagagtgtagggaagacaatctgatttccctttttaaaagatcagtggctgggcacggtggctcacgcctgtaatcccagcactttaggagtccaaggtgggcagatcacctgaggtcaggagtttgagatcagcctggccaacatggtgaaacattgtctctactaaaaacacaaacattagctgggcatggtggcacacacctgtaatcccagctactcaggaagctgaggcaggaaaattgcttgaacccaacccaggaggcagaggttgcagtgagccaaaatagcaccactgcactccaccctgggtgacagagtgagactctgtctccaaaaaaataagactggttagcctactttttggaaaactgactttagagagagcatttctccaccaacaaacaattatcattgtcaaaagaaagcaagttacatattaccaacctcacagtcattttgaaaataggccatttatttctacaatagcctgtgttatagaatgactttagttttcaataatcatttgctttgattttatttatattaaaggtttttagaatttgtattatacaatggatcaataaacatgagtatatgtaatttatatgtacaggttaagaaacaattttttttaatctcacatgcctaccacccatgtcaagaagtaaaacgttaccagtacctcacaattcccctatgtgccctgcccaaactgtactccctatttctccactacaatcagaaaaaaatcactatcctggtatttctatcgttcactgtttataaatagttttacctggaggtcagagctttgggagataattttaaaagatagttttactatctatatactaaacatacccattatgtttagtttaaaaaactaagtctaacacaaacctagccaattgtattttaaagagcaatactgccacacctgagctcccaagaaaagacaagatacacagaatctgtgagttgcagcagggcttcagcttatttgagagaatatgtaaagccatttctgggaagtcttataggcaagtcattaggaaatacaggaaatatagaggtcaagagaactggagaacctatcagaggcagtgtgtgccaggtagagtgtattggcatgaaatactttatatttttcaattctaagctcaccatggtgaacctctaccctaagaagtaggtcgaagcacagcatgtctttgtggagtgaagtgagaatcttcaggtgattcacattagacaggaaaacaggaatttaatcagcacatgatgaaggcaagcaagctaagtactcctaataagaatacaggtccacctctcctgagtgaaactgctccagtccagatggactgtcatctgcctactacatagctgctattgggatctccctttctacagtcctggagatccccttcatctctcttctatgttgtctcttgtttcttatatttcatttcttcctctttgtattattctctccttttgtgcaatatcctgcagtgccttcttaagaaaggatgtatataaatgttttgagatctcaaatcctgaaaaggtatttattctcgcttcatacttgattaatagtcagagtataaaaccacagatagaaaagcatttaccttcagaatctgaaatgcttttaaaattctaaagtcatttggtttttaaatttgcccttaatttaattcatccaatggtctaaaagctaaattgcaattgaacaactatcagtattatctttttggatgctgttttccttaagatatttgtgactttaaaactgataatttccaattaattgccagatattgttctaaattacccagctaaaagactagtcattaatcttcacaatcatttgatagctaatctatagctgtttgtaatgtttggaaagcacttctataaactactagttaaagatacttgtgagctaatgactataacatttcttttgccattattttcaacttaattggcactcaaatttactaattagtagataaaagataaacacaatacatccagatgttaatattatctttttaatctatacattaaaaccgtataacctgtaaaatttagacattttaaactgttaggcaatgtttagcaactgactttgtttttaagcaaaggcatctttttcagtgtctgttttcatatgaaaataccagctaaatatgatgttaacttctgattaagttaccaacctttgataaataagatatatctttaaaaacaggtggatcttcccatatgtattatcaatgagcataagtcaaaatgattgccaccacattaatgagatcttttataaagactctgatgtataacaatggtataggtaacagatataatggtaaaatcaagcattactgacataattaagagcaattctaaaggttggtagtacaatccccatttataaagataggaagaacactgacaaaagaatattgcagcaaataacttctaatcttttcatttttaaaacagtcattttgatcaattttaatttcttaaaaacagtctaaacagatgctttcatgcaaatctagcgtataaactggtacaaatttttagagggcaatttagcaatatctactaaaaactttttaaaacatgtacagactccttcctctggaaattccacttacaggaatttatcctacaaaataagggttacagtattgaaccaggctcatcattggtcaatgataaggaacagataaagtatgattataatataaatcaatagattttttaaatctctcttccatcaatttttctaaatacaattttggagaatgccagaatataaaaagaaaacttgaatcatttacacggtcactccttcctagaattttaagtggtctgataacattcaaatgttatatcaaagctgaatcttatgctctttacttctccataatgtcatataatatgcaggcattaaaattcatgtaagaagcatatcattaaataatactctaaaatagtaaaaatacgatcacattttgttagcaaataattatatgttatgtatagattcatgtatagaagagaagactaaaaggtctcgcactaaaatgttaataagttatacataggtgtttggataatggataatttttgttttctgtgtgtatgcatttctgctgggttcaagatttcctgtaatgaaaacttattattattttaaattttttaaagtaataaatgctatttggtttcaaaatgttaaagctaagaatacttttagccaggaacaaaggtacatgcctgcagtcccagctactggagaggctgaagggagaggatcacttgagccaaggagtatgaagctgtagtgtgttatatataatggcacctgtaaagaaccaccgcactctagcctgggaagcacagcaacagtctgtctctctctctttttcttttttttttttaagtgccatttaaatttgataaaaacacacacacaaacactcacacagaaatcaggtatttttaaagaattatttagcaattaaataaggtgcaaagtgctgataatccatgaaatgcggacattttgtaacttttttatttttgtaatttttgtgagatatctcctttcatcacccagactgaagtgcagtggcacaatctcagctcactgcagcttcagcatcccgtattcaagtgattttcatgccttagtccccagtagctgggaccacaggcatgcaccaccactcctggctaatttttgtatttttagtagagacagggtttcaccacgttgaccaggctggtctcaaactctggcctcaagtgatccacctgcctcagcctcccaaagtgctgggaggcatgagccaccatgtccagccaattttgtaacttttgaaatttcttcaaacaagtcgcttttaatcttatcatacagccaccataaacacatatacatttttgtatatgccagttcatatcttatgatttaaaaaataattttaataaaccaattagagaattctttaaaaaaaaatcttatttccacatgcttttacccaatctaaatggtagttttttcttatgtacagtgactgaaatgtatacttcagatatttcatttcttatgtacagtgactgaaatttatacttcagatatttcatcagtaaacagcaagtaaaatcttcagatatttcaaaaaatccaagataattaaggactttatcctcaaattcactatttaggaggaaatccaattcatattatacttttaactctaacatgactaatctttattcattttaagtcataaacccattctaacttatggcaatatgagtctagacaaaatacagtatctaaggtgttagttttatgtgtttagaaaagaatgtgtttacaaaattctcataattcagaatagtttaaatgccttaatttaaattttaattaatgagtaaaagcattttatcataccaagtgaaaaaaagtattacttaagcacagaaaaatgttcaatttgaagccaaaaacaaacaaaaaaaaatgaaaacctagacaacaaataagacaatgaaatcacaaacgttactaggtgcactctttaaaaccctgagatcaaagtaaccaacatagtgcagttatactagaagagcctattactgcttataaaacccagttcagctgctggaggagaggcatatagtgacaaacagcttccctgctacaaaggtggcaggaaatctatcaaactggacaataaaactgcaattgagtttctttggctttttatagcagcagcatgtatcctgatgtaactctgcaaaagctatccaattctgcaacattagttctttacacatcagttctttatcaagaaccatgttataaatttgggatattgagattcaaaatgactgcaaaaaggaaaaagcatcactttaacactgtatgtataaaagtattataaaatcttcagaacttatatttttagagaaaagaaaattttgttccaataattccagtggaatttttaatagctgctaaaaattgttcacctacttactgaatcactacagctctattctaagctttattaaataatgacttgaagagccttagggtataagtttctgtcttattttaaaaatagctataaagatttaaaattccaaaaaacttaacagcattcaaataaattactttgtataagcctcatgaaacagaaaagccttttaaaaatgaagaaaatccacacgaaggaataaaagacatgtatgaaacactaaaataaaaggtgaacaaatgtaagaaccaacttacaactttaaacttttgttttccctctcataagtaatgttttagcatgtatttttaaaagtatactttgacagcaaaaagtggtaggtctagttttactcagataaaaagactccatgattaacttagcattatcccatcttataaatgaatactaaaacttaagtcagtgtggttcttggtcaaaagtaggcactagagacctctccttaaagcaactattttcttcagaaaaattttaagatctgtttaaagccataagtcactggactaaagaaacatataggccgggcgcggtggttcacacctgtaatcccagcattttgggaggctgaggcgcgtggatcacgaggtcaggagatcgagaccatcctggctaacatggtgaaacctcttctctactaaaaatacaaaaaattagccaggcatggtggcaggcgcctgtagtcccagctactcagggaggctgaggcagaagaatggcgtgaacccaggaggcagagcttgcagtgagccaagatcgtgccacagggcgacagagcgagactccgtctcaaaaaaaaaaaagaaatatataaactaaacaaaactatagtcatgcatcacttaatcatgaagatatgttctgagaaatgcatcattaagcaatttcatcatgtgaacaccatagagtgtacttaagcaaacctagattgtatcacctactatatacctagactctatggtatagcttattactcctaggctacaaacctgtatagcttattactgtacagaagactgcagacaactgtaacacaatatatgtatttgtgttatctattttttttaatgttttaatttttgttttaacaaaagactgagtctcgctctgtgacccaggctggagtccagtggcacaatcatagttcactgttacgttacttcaaactcctgggctcaagtgatcctcccacctcagcctcctgagtagctagaaatacaggtgcatgccaccatcccagctaatggtgtgtgtgtgtgtgtgtgtgtgtgtgtgtgtgtgtgtgtagattgagactcactatgttgcccaggctggtctcaaattcctggcctcaagccatctttcagacttggcctcccaaagtgctgggattagaggtgtgagccaccattcccagcccttatattgtgtgtacgtaaggtttagaaatgtgtatctaaacaaatataaacatagaaaaggtatagtaaaaatccaatataaaagatttaaaatggtacctacataaggcatttaccatgaatggagcttataaaactagaagttgccctgggtcaatcagtgagtaagtggtgagtaaatgtgcaggtctagtacactacagaagactttataaacactgtaaatataggctacactaaatttatttttaaaaactacttttctttgttcaataagaaattaacctcagcttactgtaacattttaactttttaaacattttaatttttaaaactttttgactcttttgaaatcaaatttagcttaaaacacaaacacattgtacagttgtaaaaagatattttctgacaggcacagtggctcacaactgtaatcccagctacttgggaggctgaggcatgagaattgcttgaacctgggaggtggaggttgcagtgggccaagattacaccactgcactccagcctgggcaacagagcaagactctgactccaaaaaaaaaaaaaagttagaatggtgatcattaaaaaataaggaaacaacaggtactggagaggatgtggagaaataggaacacttttacactgttggtgggactgtaaactagttcaaccattgtggaagacagtgtggcaattcctcaaggttctagaactagaaataccatttgacccagccatcccattactgggtatatacccaaaggattataaatcatgctgttataaagcacatgcacacgtatgtttattgcagcactattcacaatagcaaacacttgcagccaacccaaatgtccaacaatgatagactggattaagaaaatgtggcacatgcacaccatggaatactatgcagccataaaaaaggatgagttcatgtcctttgtagggacatggatgaaactggaaaccatcattctcagcaaactatcacaaggacagaaaaccaaacactgcatgttctcactcataggtgggaattgaacaatgagaacacttggacacaggaaagggaacatcacacactggggcctgtcatggggtgggggagagggaagggtagcattaggagatatacctaatgtaaatgacaagttaatgggtgcagcacaccaacatggcacaggtatacatatgtaacaaacctgcacgttgtgtacatgtaccctagaacttaaagtataatttaaaaaaaaaaaaaaaagtccaggtgcagtcacgcacgcctgtaatcctaacactttaggaggtggaggtgggtggatcccctgagctccggaattcaagactagcctgggcaacgtggtgaaaccctgtctctactaaaaatacaaaaaaattagctgagtgtggaggtgcacacctgttgtcccagctactcgccaggctgaggcaggagaatcgcttgaacccaggaggtggaggtttcagtgagccaagattgcaccactgcattccagccagggtgacagagcaagactctgtctcatttaaaaaagacacacacacacacacacacacattctaaccgggtgtgtggctcatgcttataatcccagcactttcagaggcccaggcggggggccacttgagtccaggagttgaagaccagcctgagcaacacagtaagacctcgtctctacaaaaaaactaaaaaagtagccaggtgtggtagcacaagtctgtagtcccagctactcaggaggttgaggtgagaggatcacttgagcccaggagtttgaagttgcagtgagctatgagcacaccactacacttcacctgtctcaaaaaatattttttttcctttctctatatccttattctaaaagcttttttctctttttaaaattatatatttttcaaacttttttgttagaaactaagacacaagccagtcccggtggctcacccctgtaatcccagcactttgggaggctgagtcaggcagatcacctgaggtcaggagttcgagaccagcctggccaatatggcgaaacaccgtctctactaaaaatacaaaaattagccagttgcagtggcaggcaactgtaatcccagatactcgggaggctgaggcataacaatcatttgagcctgggaggcggagtttacagtgagccaagattgcgccactgcactctagcctgggtgacagggagactctttttcctgagcttacacagctaataattactataaatcaggattcacaccctgtctccaaagtccacattctttcattacttacacaaacggatttgaaaactggatataaatacttagtcataaatgctcacaagctcaaaacacctgagatatcacctaatccaactcctttattttgtatatagggaactcaaaaagactaatctattcatcctaaatatcctattattttctaagatagcagttctcaaactttttggtctcatgacactttatttatttatttatttattttattttttgagacagagtctcgctctgttgcaggctggagtgcagtggtacgatctcggctcactgcaactccacctcctgggttcaagcgattcttctgtctcaccctcacaagtagctgggactacaggcactcaccaccacgcccagctaatttttgtatttttagtagagacagggtttcaccatgttggccaggatgatctcaatctcttggcctcatgatccacccacctcaacctcccaaagtgctgggattacaggcgtgagccaccgtgcccgggcaacactttacattcttaaaaagtattaaggtccccaaagactctttatctatgtggattatatctactactgcttattatattaggaattaaaactgagaccttttagaactattaacccacttaaaaataataaactcaatatataatataaataacattttttgaaaatgattatttttcaaaaccaaacaataacaagaagagtgccattatttcatatttttgtcaatctctttaaagtttggcttcatagaagacaactgcattctcatatttgcttttgcattcaatctgttgcatatattggtttggctgaagtatataaagaaaatccaccctcatacagctatgcagtaggaaaggaggactgcacagaccccatgaaaagctctcatgggcccacgttcttttttttttttttttttttgagacagagtctcactctgtcacccaggctggagtatagtggtatgatcttggctcaatgcaacctctgcctcctgggttcaggcaattctcctgcctcagtctcccaagtacctgggattacaggcatgcaccaccgtgcccagctaatttttgtatttttagcagagatggggtttcaccatgttggccaggctggtcctgaactcctgacctcaagtgatccagccgcctcagcctgtgattacatgcatgtgccatcgtgcctggcctccctcccaaggtctttaggttatacttttaacaacgattgctttaaagtttatactcctccagccatctttcctaaggacttgaagaaactaaggtgaactgacatagatctgttagaaacgtgaaaaatctgctttatactgggcacttccctaacctataatctcccctagaaatctctgaaatctactccagatgtatatggggcacaaagtcaaccctatttttcttataatcttttgtaaatggcaacatagtatgagaaaaaaaatcagtctagattgcagcagcctactgcaatagaaatgagaatatctgggcatcagcacaaactaaagttacagaaaggatggcaaacagttcctgtaatgagccaaatagtaaatattttagattttaggggccatgtcgttgatgtaacatgtatgattatccttatagtgtgaaagtagccatatacaatatataaaggaatggtagtggatacattctagcacaattttatttagatctgacacttaggccatggctagctgaattctgttttaaacaaaactgatcaacctcaacaatacagtgactaaaacaaagccattttataaaatcagatctcttttcttatttacaaatggattttactccttgtaaacccttgtagaagcatactttctctcaatgaagaaagaggaggaacaatgaataatttgtaggaactttcaatcaataattaaaagctattcaaatacctagaaacatgtaattaggaaagggcaatatattcttttttttttttttttttagatggagtctcactgtctcaccaggctagagtacaatggctctatctctgctcactgcaacctctgcctcccaggttcaagcaattctcctgcctcggccccccaagtagctgggattacaggtgcacgccaccacgcctggctaatgtttgtatttttagtagagatggcgtttcaccatgttggccaggctagtctccaacttttgacctcaggtgatccacccgccttggcctcccaaagtgctgggattacaggcgtgagccaccacacctggccagaaatggcaatatattctacagaatgacaaaatatcttagaataataactttgatagtcagtaaaatgtaacacttaaagatatagagaaattatcattcttggtatttattccttctagtcaattttttattaaataaatagctatataattatacagtattccttctgagtaatgaaaaagttcttaaaattcaaaaaacatacaccgtaaatgaaactaatagattttaatgcattaattacttgaaatgtaaattttcctcagaaggtacaaacataaaactccaaaaatagttagataatccacatattggcagaagatgttcataaacaacatagctagcaaaggattaagaatgagactacataaagaactcccacaaaacaacaagaaaacacagatcaagattatggtgatgtagcattttaaattcatcaaagtgacaaatttttaaactccagccataccacgtgattaggtgatgtgaagcaatgagaacttaaacactgctggtgatatgtaaactgatacactactttagaatactgtattgtattggaatacgatactttggaaaagaatttgcattatcttgtaaagttcaacattttcaccttataagtcagcaattctacttctaggaatatatgcagaaaattcttgaacaagcacaaaatgtatacgaaaatgctaattaattggtaaataaatagtcatgtcatgcaatacattacaattgagaaaatgaacaaaactatatgggtcaatgtggatgaatctcaaacagtaataagcacaaacagtaattaacaaaaaaatgcattcagtatgccacatttaccttaagtgcaaacataaaaaataaaactctttattgtttagagttatatacacgtagtaaaggtatagaaaagacaaaagacaacaccaaataaaagctagtggtgttgggggtcaggcgaagaagaggagacaaagcaattatagaggagtaacccaatttcataaacagtgatcctttttgtatgcttagagtatttcaaaaaagaatttaagctatatataaataactaaacttactttggcttaatttaaaaaaaaaaaaaaaaaaaaactacattcttccaaacccagtttttagctacctgtaagattagcacagggcagacatcacccagagcttttctgtttactcatccaccttacgttgctaaaacaactgttcatctttgaatatagtgcgccaccttgtgttcaaaagcttttaactcatataaaattctgagacccatgtttgtaaacagggcttcctcgaaaaaaaatattaggttggtgcaaaaataattgcagtttttgccgcaactactttttcagcaccctagtataaattcctttatgctgtggcaatagatttaccattataaagataagtacatgtaaaaacaacattagaaaaaattattttgattctaaagaaattacaaatgctttatttctattgataatctttttgagctttcattttgctgtactttcagaagataacttgccttttttccttgattttaagtatcgaaattttttaaatgactaaaattcaaaaattatagatatttaaaatgctacaatacgctttcataaagaaacttacctttgaatgagtgattgataaagtgtctacccatacacgccagccaccccactcatatttgactgcatggtaaagcaggattctgaatatggcgtataccatttctgttatcttttgctcatctgaattcttaggattaaaatagcagagagaaagcatccattcttgccacacagagcattgtagcaagctcctgaaaattatgagagggtactaaattactgaagaaaaaaaaattatctaaaataaatctaaaggtttaaaacaaaataaccctgcccctccctttccccccgaaaaagaaacacatttagttatacattaagaacaattcgacaatgtggtactaaaaattctaacttaactatgtggtacattatttacatactcttaataaaaaaaatagaaaaatcatttcacagtatttttaaagcaatttttcttagataaaatgggcttatacaaaagtacatttgaatactgcaaataaatgctttctgattcagcttacctcctgttttctctactgttattaaaaagtttaatcatgtcagaaagaaaggctctgcgaacctccatgctctctgggcactggggagaatttcgaagtagggtcgcaattacttttagtatctctgtaagacagtttataaataagtaaaaaccaaactcaacaaaaaactcatgatagaaggtcatccatctattgcaatttctttagtttccctaacacaaatgtctaccaaaaacatcctcttctgttattaaaaaaaatcacctctggaaagaaatgacaatacattcattagaaagcatttataaatatgaaaggaaatttctttcatgattcaaatgtgcaaaaataaagctgaactttaaaaggttaaaataaaacaagttaaattataaatgaattaaatgtcagtgaaactgcttactctctctgagatataccaaatagtaaagttgatcttaaaaacaagcaggccgggcgaggtggctcacgcctgtaattccaacattttgggaagctgaggtgggtggatcacttgaggtcaggagttcgagagcggcctggccaacatggcaaaaccccatctctactaaaaatataaaaattagccaggtgtggtggcgtgtgcctgtaatcccagctactcaggagggtgagacaggtgaatcgcttgaacccaggaggcagaggctgcagtgagccaagatcgtgccactgcaccccagcctaagcgacacagcaagactctgtctcaaaaaaaaataatgaaataaaataaaaaatactataatcaaaatctcagaaaaatataataaattcttagattcctcatcataatttatggtatgcacacacagtctttcatagctgggattataggcacctgccaccacgcctagctaatttttgtatttttagtagagacagcgtttctccgtcttggtcagggtggtcttgaactcctgacctcgtgatccacctgccttggcgtcccaaagtgctgggattacaggcatgagccaccacggccggcctaccatagagaatttttaaaggtgtgaagattttctttcataatcttaaaagtaaaattagacacaaaaaacccaaaggaaattaaaacctattcaacatcccatctccccagaaaatgcaaactaaactactattgtaatggtcttagcataaagctatttaaatctccagaatttagcttaaattaggccaggcacagcggctcatgcctgtaatcccagaactttgggaggctgaggcagttggataatttgaggtcaagagttcaagaccaccctggccaacatggcgaaatcccatctccacaaaaaatacaaaaattagccaggcctggtagcaggcacctgtaatcccagctaccagggaggctgaggcaggagaatcacttgaaccaggaggcagaggttacagtggctgagatcctggcactctactctagtctgggcaacagagcacaagactcggtctctaaataaataaataatctccagaacttagcttcttagcttaaattaaaacaaaaaaaaaaattcttttaaaaatatgcacttagaccaggtgcagtaggctcatgcctgtaataccagcactttgggaggttgaggtgggaagattgcttgagcccaggagttttagaccagcctgggcaacataggcaaaataatgacatcacgtttctctgaaagctgaggaaaattaaacctcaaagccacgtgctttgaaaattagcactggagtaccaaacacacaaatacacctaaccacataaaatgtaattaaattttaaaactctacaaactaataattttaataacatgatcttaaaaagcaagatgaaaaaggtatactttatacaagtgcttaagaattctaaatatcaaaagaaaagactgtttaacaagactatcttcataaacaataaagaagacatattgttctattccaaatttggtatttttatattcacagtaatttaagataaaactaccccaatggttcttgtaattctgcctgacatcactaaatagcacaatcaaaattttgctgaaagtctgaacatatattacatcaagaccttaagcaaacaattcttcaaaacctttatataagaatttccacataacttaaggttgattcgaaggaatactcaatataaaacccaaacaaaactagtataatatcatcacccttaatgaaacattcatctaacaatctgtttcaacaacatcaattttaggttgttcacagtgactttctttttaagtagcaaaaggtagtttttgttaaagtatataaaatacatacgagggttttgtatcttcactgaagaatcaggatctggatgctgtttatgtatcacctgagtaccaatctgttctataagaatctacagaagtaaaacaatggattacattagcaaatcactggattagcatcactattaatgaactttaagtgcatcactattaattaactttaagtacaacactaatcaaaatatagtatatttttagtccaatattgtcatgctaaataatatacttctaaaataactacagcattattactctatgttttcttaattataaaatgagacatcaaatagttaataaaatggagggaacatttaaacagaaataacgatactgtttagaaattcacagattaattatagatttctaaaaatgcagccacatctccttatatcatttcaaagctgtacattacaaacttaaatggtctggtcagcatggtggctcatgcctgtaatcccagcactttgggaggctgaagtgggtagatcgcctgaggtcaggagttcgagaccagcctagccaacacagcaaaacccgtcactactaaaaatacaaaaattagccgggttaggtggtgtgcacctgtaatcccagctactggggaggctgagacaggagaatcacttgaacccgggaggtggaggttgcagtgagccaagactgtaccactgcactccagcctgggtgacagagtgagactctgtctcaaaaaataaaataaaaataaatgatcttatttacctacacaatgttaagaggcatttttataataagaaatttagaggagtaaatcctaagtacattcctacctcaaacagcacattatatgtggtcattgtgattaaatttgtctgaagcatgagcctttcagctagcaatgaaaacaatccatgtccaagcatgacttctgctttcctcctgcaattacacaaaaagaaatcatcaaatgtagagcttttctgtgctctacttaatatgcatgctggatgaaggaaacacaaaatactttttcacattacaaacaattcccaactcaattactctcccaactatcttcaatctagaacttttaaggccacaaaacctttaagcagagaaatgctaactatataagcatagccgaagttaaaaattaaaaaaaaaaaagacaagtgtgcctatgctacagcacagcaaaaacctcctccaaaatcttcagagcagttatttatttaacgaagttgctacaatctaccagcactaacttagtctcccctggggatgatcatctaaagcacaataaatacttaagtagaaaaacaatgtggagaaaaagtagaagaaatgtaatataattttttaaaataaatactatgaaaacatatataccaaaattaaccttccaagcataaattcagaaactaaaggatcacaaactttaattttacccttggggtcagcaaagcttttctgcaaatggccagggggtaaatattttagaatttgtggaccaggtgatttctgtcacaactcaacactgtccttgtatcatgaaagcagccacagatgatacacaaataaattattgtggctgttttccaataaaactttatttacaggtggctaactggattcctaaagacttcagtttaccaacacttgttctacccccaaaattttctttttaaaataaactacttctggtacaaagaacaagaggtagaacatgaatatctgtattcagctaagaaaataagcgtggaagtttcagttttgagttacgcatacagcagaacacactatgtgacaaacatccaggttatgtattactttataatacagataaagcaaaaatggtgtgagtcacctgaaatcaagtctccatagcttcttgaatgcaagctgtccaaactaattctcataattcacattaaatacatgaataatttaaataattttatgtacaaaaaaattaatcctgttcacttaatttttaaaatatgtactagtgggattacatttatacagcaatttatgaataaaaataaaagaaaaactagaggactatagaacaaaattactactgcaaagatttataaaataaataagtagaatacaacagtccatcttagatttcggcatacttactttggggccagatgttttaaaaaataacccattgccttaagagcttgtaccctgattccttcacttttcgatgccagaagtttgtagataacactgaatgaataaaaatttaaaacaaactattttgagtataatttttaaatggaaaggtttaaaatatatacttttcatattattataaatctatttcaaataatatggaaggaaatttaatatagatttctgtatataaaaaatctgcttatctcaggctagagttcctttcaatgaaaactaagaaatgagaagaaattggaatataagaaatgaggtgacttttccatgcacatacttatatgtaacgtgtgtatcaagctagctttcagatacttttttccttctgctacaggcttgtaaatgttctgaaggttaccaacttgttattttaagtcagtagaaagaaagcatttctaatggtagcacatatttaaatttctaaataattgtcgccatgaaaaacaagacagtaggctaataataaatgattatcagaaataattacaaaagtaaaaagatttacaaccaaagaactgctaaaaataaatttctcattcaattctcaaaaattatatagtaatctaatttaatttttaaagatctatgaggcagctggatgcagtggctcacgtctgtaatcccagcagtttgggaggccaaggcaggcagatcacctgaagtcaggagttcgagaccagcctagccaacatggtgagaccccatctctactaaaaatacaaaaattagctgggtgtggtggcatgtgcctctaatccagcttctcgggaggctgaggcaggagaatcgcttgaacctgggaggtggaggttgcagggagccgagatcatgccactgcactccagcctgagcaacacagtgagactctgtctcaaaaaaaaaaacaaacaaacaaagatctaggaaggccttctgattttagtataagtaaagtataatgcaactgaaattaaactgattcattacagcattcccttcctcataaacatttagaacaagaacagtaattagaaactcttataattacttataaaaattaaggatatcagtatcctcctagatcaaaattttggtgtttagtaagttagaaaacattctgaacaaaaaggaaatatcttcaacctctagtgatcaatagaaaagcaggtatataaaaaagaagtttgattccttttaaaacatgaactaaaggcatccaggtccatatcacattgtaactgcataattttaattcaaatcttagtacaaaaacttaacagtcaatcattaggaaaatactaatatgttgtatgtttcttttcttcaaggatttaaattcagccaaataaaaattaaaccttttaaaagaaatattaatataataccagtttaaaatcacaatagttttttgagtttttttccccaaagatggcagatttgagggctttagcatttctcagccacttagaaatagcaagatagtatataaaaatcaactgtgagctttaattcaggaagaaaagcaggactccaccagaatcatgaaaggcaccctagttcccgagagcactttgtttctcccaagacctggagctaactgggaaagaggtatggagatactgtgagggaaagacaccaggaaaagttgcagggaccaacagcaggatgccattttgaattcaagcacacacaattcaaactggaaatctggcagtgtggctgtgcaggcatgccagagattagagtccctgctttggagccagaattgtgaaaactgcctcagcagtaggtgttataattgtactctaccccgtcgcaggcctggggtgggaggaaagctgctacagctgcaatatctcctggacaacaagacttggcaggcagaggcagcttggtgacctggaaccagtctgcatgtgtcattgctgggtgctccagcctgctaccctgacactgtggtgcagcagggccctctctgctccactctcaggcagaaatccagacattcaagccaccccacccttcgtagacacagatcatagcactggaccctctttgctccatgcccaggcagatctccaggcaactgacgcacccactcccacggactagcaacctgagccctattccacgtggtgcagcaagatgcacaggcagatctccaggcattaaatgcacttgcttgcccagattggcagcctgagccaccccactcttcctttgcagagatccaggttcagaggggtcctctatgcttcatgctcagggagatctccaggcattcagagcagctgcttggctactccagcagcctgagtcacctcacccctctgtgcaaagatcttggtgcaagggggaacctctctgctccatggccaggcagatttccaggcattcagactactcagtcacctggaacagcaccctctgcaccattcctatgtagagatcctggtacagggggccctctctgtttcacacccaagcctatctccagggattcaaaataactgcttgcctggttcagtaccctgaggtgtcccaccattccggtgcagaaatcctggtgtaggagaccctctccatttcacagccagtagatctccaggaatctggaaaacccatttttcctggattaggagtttaggccatccccattcccatgcagagaacttggggctgaggtttcccatcactattttttgtgcccttctccagagcatagaagggagctcagaccaccatgcactacacacatcagcttattgcctgaggcaacagagaacttctcccactaaacaagggtcaagtatatacccagccacattggccaaagcccactcttactcataactgccatccaatggcttgtaggttgaactgcacagcccaatataaaacctgctgacggaagtgtataaagctacagaagcaaagccaaaaggccctacccagcattctctatagccacaccccctatgaagacagggaaagagaaagaagacaaaaaaataataataacattacagagaaagaaaaaaatcttaaaagcatgaaaattattacaaaagttacaagtgtcagcatctccaaagaaggaaccaccacaaaacttcagacaccatgaaaaatctgagtgtggtgacaccatcaaaggatcacactggctctccaaccatggtccataaccaaaatggaaactcagaagaattgacaaataaataattcaaagcatggactgcaaggaagctcaatgatatccaagacaatgttgaaaattaaaagaaacttctaaagcaatccaggagatgaatgggattaaacatcttaaaaagaaatcaatcagagatcctggaattgaaaaactcacttaagaaattacaaaacaagactgaaagttttatcagcagactggacaaaccaaaagaaagaatttcaaagcctgaagaccgatctttcaaatttacctgaacaaaaattttcaaaaacaggttgaaaaatgaaaaaaagtcttcaagaaatataagactatgcaaagcagccaaacctataaattactggcattactgagagagatggataaaaagaaaacaacctggaaaatatatgtgaggaaataattcaagttgctagagatatagacatccaaatacaagaaatctagagaacatcacaagataccatacaaaatgaacatcaccacagcatatagtcaccagactgcccaagatcaatattaaagaaaaaatcttaaaggtagccagagaaaaaggtcagatcacatacaaacagaaccccatcagcctaacagcagacttcttggcagaaaccacacaagccaggagacattgagggcttattttcagtatccttaaaagaaaataaatttagccaagaaatttcatatccacccaaactaagcttaataagcaaaggagaaataaatgtttttcaggcaagcaagcatcaagggaatttgttacctacagaccaaccttacaagagatccttaagggagttctaaacacggaaatgtaagaacaacacttactaccacaaaaatacatgtacgtagcttgcaaaccttataaaacaaccacacaaaagaaattacaaagcaaccagctaacaacttcatgataggatcaaaatctcacatatcaatattaactatgagtgtaaatggtctaaatgcccccactcaaaagacacagaatggcatattggataaaaaaaacaaaactcatccatctactgtctttaagagacctatttcagctgggcgcagtggctcacgcctgtaatcccagcactttgggaggccgaggcaggaggatcacgaggtcaggagatcgagaccatcctggctaacacagtgaaaccccgtctttactaaaaacacacaaaaaaaaattagccaaccatggtggcgggcgcctgtattcccagctactcaggaggctaaggcaggagaatggcatgaacctgggaggcagagcttgcagtgagcagagatcgcgccactgcactccagcctgaatgacagagcaagactccgtatcaaaaaaaaaaaaaaaaaagagagacctatttcacatataacaccactcataggctcatagtacagggttggggaaagatctaccacacagagagaacagagaaaaagagcaggtgtcactattcttatatcagataaaacaaacgataaactatcaagagttaaaaaggacaaaaaatggcattgcataatgaaaaatagttcaattcaacaagaaaacttaattaccttaaatatatatgcacccaatagtagagcaatcagatatataaaacaacgactacgagacgtaggaacagacttagacagtcacacaatattagtggtggatttcaacaccccactgacaggcattagacatgccatggaggcagaaaactaacaaataaattctggacataaattcaacacttgactaattggacctaatagacatctatgggatactccacccatcagccacaggatacacattcttctcatctgcacacaaaacatactccaagatcaaccacatgcttcgccataaagaaagtctcaataaattcaaaaaattgaaatcatgccaaccatattctcagaccacagtgaaataaaaatagaaatcaataccaagatgatctctcaaaaccatacaattacatggaagttgaacaacttgctcctgaatgacttttgggtaaacaatgaaatgaaggcagaaatttaaaaattttttgaaataaatgaaaacaaagccacaacataaccaaaactctaggatacagccaaagcagtgttaagacgaaactttaggccaggcacagtggctcatgcctgtaatcccaacactttaggaggtcaaggtgggcagatcacttgagagcaggagttctggaccagcctggccaacatggtgaaaccctgtcttttccaaaaatacaaaaaaaaaaaatagctaggcatgatggtgggcacctgtaatcccagctactcaggaggctgaggcaggagagtcacttgaacctgggaggcagaggttgtagtgagctgagactgagccactgcactccagcctgggtgacagagcaggactgtctcaaaaaaaaaggaaattttatagcacatagcactaatggcctaagtcaaaaagctagaaagatctaaaattaacaatctaacatcacacctagaggaactagaaaaacacaaactattaaccccaaagctaccagaagaaaataaaaaataacaaaaatcagagcagaactaaacaaaactgagaccaaaaaaaatccatacaaagaaccagcaaaacgaaaagctggttatttgaatggataaagaagactgatagaccactagctagattaaaaaaaaaaaatccacatacaagcacaatcagaaatgacaaagttgatgatacaaccaatctcatagaaatacaaaagatcctcagagacaattatgaacacctctatgcacacaaactagaaaatctataggaaatggataaattcatagaaacacaaaatcaggaagaaattaaaaccctgaacagaccaggattgagctccgaaactgtatacctgcttaaatttggcagtgaatttttctggtccaggaattttttttttttttttggttacctactaaccaaaaaaatcctagatgaggtaaattcactgccaaattctagcagatatacaaagaagaggtggtagcaatcctactaaaaatattcaaaaaacttgagtacaaggaactccaccctaacttattttacaaagccggcatcaccctgataccaaaacccagcagagacacaacgaaaaagaaaactacaggccaatatccctgatgaacacagctgcaaaagtccccaacaaaatactagcaaaccaaatccagcaacacatcaaaaagttaattcacgatgatcaagtaggcttcatttctggaatgcgaggttggttcaacatacacaaatcaataaatatgattcaatacaaacagaattaaaaacaaaaccatacatttatcccaatagatgtggaaaaaactttcaataaaatccagcatctcttcatcataaaaatcctcaagaaaccaggcatagaaggaacatacatcaaaataatgagagccatctagggtaaacccacagctaacatcatattaaacagacaaaaacaggaagcattcctttgagaactggagcaagaaaagggtgcctactcttaccactcttattcaacatagcactggaagtccttgccagagcaatcaggcaagaaaagggaacaaaaggcatccaaataggacaaaaaaaattcaaactctctctcttcatgacaatataattctacaactagaaaaccctaaagactcctccaaaaggctcctgtgactgattaaatgacttcagtacagtttcgggatataaaattgatgtataaaaatcagtagcatttccaaacaacaaccttcaagttcatatccaaatcaagaaagcaattccttttacaatatccatgctcaaggattggaagaatcaatattattttaatggccatactgcccaaagcaatccacagattccatactattcctacaaaactacgaatgtgatttttcacagaactagaaaaaaactatactaaaatacatacggaaccaaaacaagagcccaaataggcaaagcaatcctaaacaaaaagaacaaagctggagtcatcacaatacccaacttcaaactatactataaggctacagtgaccaaaacagcatggtactggtataaaaacagacacatgtgtcaatggaacaaaatagagaacccagaaacaaagccacctacctacagccctctgatctttgacaaagtagagaaaaataagcaatggggaaaggactccctattcaataaatagtattggaatagctggttagccatatgcagaagaatgaaactggacccttacctttcaccatacaaaacttggccaagtgtggtggttgacacctgtatcccaacactttgggagtctgaggtgggtggatcacgtgagcccaggaatttgagaccagcctaggcaacgtggtgaaactctgtctctacaaaaaacgcaaaaatcatctgggcatggtggcacatgcctgtaatcccagctacctgggaggccaaggtgggaagatcgcttcagatgcagaggcagaggctgtagtgagctgtgatcgtgccactgcactccaacctgggaaacagagcaataccctgtctccaaaaaaaaaaaaaaaaaccttttagctcaagatggattaaaggtttaaatgtaagccatcgaattagaacaatcctagaagaaaaacgagaaaacaccattctggacatcagccttgggaaagaatttatcactaagtcctcaaaagcaattgcaatacaaacaaaaattgacaagtgggacccaattaaactaagcgcttaggtacaaagaaactgtcaagagagtaaacagacaatctacagaatgggaaaatactgacaaactgtgcatttgacaaaggtctaatatccagaatctataaggaacttaaacaattatacaagctaaaaacaatcccattaaaaaatgggaaacgccacaaacagacacttcttaaaagaagacatacaagcaggcaacaaacatatgaaaaaatgcttaattaacatcgctaatcatcagcaaaatgcaaatcaaaataatgagataccatctcagaccagtcagaatagctattactaaaaagtcaaaaaacaactgattctggcaaagctgcagagaaaaggttggtgggaatgtaagttagttcagcctctgtggaaagcagcttggagatttctcaaaaaactttgaactaccattcaactcagcaattttattaccgggtacatatccaaaataaaataaatcattctaccaacaacacatgcactcgtatgtgtattacagcactaatcacaacagcaaagacatgaaatcaacctaggtttctatcaacggtagattggatagagaaaatgtaatacatatacaccaaagaatactacacagccataaaaataaaccaaaatcatgtcctttgcagaaacatggatgcagctggaggtcattatcctaagtgaattaatgcaggaacaaaatgccaaatatcacatcttctcagttataactaggagctaaataatgggcactcatagacataaaaatggcaataatagacaatgaggactacaagaaggagagaaggaagggggaaaaggttgaaaaacttaactattgagtgctatactcagtacttgggtgacaggatcaatcatacctcaaacctcagcatcatacaatatacccatgtaacaaacctgcacatgtaccccctgaatctaagataaaggtgggaattattaacataaatacataataaataaaaataaaaactgtaacacactaagatattttaacgtatcaaaaaactatccttgctatagcttaactcacaaatatctacggttaaaaatcacaatagggctgggcgcggtggctcacacctgtaatcccagcattttgggaggccgaggtgggcggatcacctgaggtcaggagctcgagaccagccagaccaacatggcaaaaccctgtctctattaaaaatacaaaattagttgggtgtggtggcacatgcctgtaatcccagctactctggaggctgaggcaggagaatcgcttcaacccgagaggcagaagttgcagtgagctgagatggagccattgcactccagcctgggcaacaagagcaaaactctgtctcaaaaaaaaaaaaatcacaataattttttcaaaagataaactctagacattgtctatgtactttcaaataatgttttattaggattaataacacaagaagatcaaaagaacctgaaattattctatgaacctaatagttatcctacaaaaaatttttaaattttgaacacttctaaccaaagcagaatcaaactagtttatctgctaaacatcagcagtaaattttgtaaaagttaaatgggcctattttgctttttgaccatagttttgttcttatttaatgcacaaaaaaatactttacacattaaagggaggaaaaatcctgtagtgcttcaatgaaatttatatatttatctaatcataaaacaataaataaatgtttattctctatttggaaataaagaaaagtgtaagggagataacaaaaataacccatgaagaacaatattcaaatctggaaatattttcatgcaatctatttgactatgcttacatgtttaaagaaatagatatggatatttttgaattgaaatatactatggtatgtacagtatattttcaatgcagaaaatataattcaggcaagagaaacgcccaaaaagataatctgaatagtaacatgatttcaatctgctcacagatattaaaaatatgataacagatcattaactagactcaaatattaaaaatttataacaatttaagcagggcatatgatgagactgacactgagtcagaaaacacagtcacttctaaggaaggataagtcttccaagctgttgacctaagttcaatatcagagctaatgtttaaatgatttcatggtagagaaaaatttatattaaataactgaatgtgaaaatttctgtcatttgatgaaaattaaattgtcattccaatttggaaatgttactgatgactatgacacagtttggcatgcctatattatctgtcaccaataaagaccatcccccctccaattttctccacttgagactgtgcttacacccccatttaactttcagttaatatgaaaccttttcttaattcacctctgtttttttcatggtggccttcaaaaattatggttctaggccgggagtggtggctcacgcatgtaatcccagcactttgggaggccaagatgggcagatcacttgaggtcaggagatcaagaccagcctgggcaacatggtgaaacgtgtctctactaaaaatacaaaaattagccaggcatgggggtgggcgcctgtaataccagctactcaggaggctgaggcaggacaatcacttgaacctgggaggtggaggttgaagtgagccgagattgcaccactgcactccagcctgggcgacagagtgagacgctgtctcaaaaaacaaaaaaattatgttactgtatactaagtaccaaggtaatcataaacaggtactgaaattatgtatcaatgtctagtttgaattttctgtctctccccgaccttccaccatctctctttttaaatcatcgaaaacaaaaatccataatttaaaaaatgtaaatactgaatttttggacccaaagaatactttcaaagaactccaattagattgaagggaactatccatcattcaaaaatcattttaaactacataactaatataaacatttaataaatatttctacccagtttaagtaactgaactgaatttaaatgggactaaatcttcacatttctatatactagtccaaattagaaattttttatttcttcacagtaataaataaaagactgagaaagtagcaaaaattaaaacatactataaaagcaaaatagggggaataatgatgctaacatggaagtcagcattttccctccatgaaaaaagacaggaataaaaccgaaaaaaattttcactgaaaaatatttattgttgagaaattgctagaaattcaggtaagaatatcaggagtcagtggccttattaatgagactactcctgtcattaccaccccagtttagttggtaagaactgtagttttaccatttgggggctggcagtaaaaagtagcactgttgctttcaaacagggcaaacctattcagggtaagaaatgaaaactgcagttctccagctaaaagtggcagacttggttacgaatcaatgggagaaaccagcagctttgctagatcagagatacaggcacaattcagggggaacagcagaccagttagatatttactagggagatattaaaagagaaccatagaaagattgagataagtactccacacagacatagctgattgagaaagtacctatatccaggagacacctgggtcactaactgaaaaagggaaggcaagagagactagataagtagccacaactttgaatgcaatccctaaaaatatacagatcaacacagtgggcctaagggctgaaggaattttatcagaacctgtagctaaatcattgactgaactctaagatatatagaaacatggaaaaccctaagagtgctatggaaagaaaaagggaaaaagtaaaaatactgggcagagaaaagtcagagctgtagaccgtggagaaaacacaatctgcaaactaaatgaggcaaattatttaaaaccaaacaaaaaccaacaaccatagaaaaacaaaaaaagtctagagttgcccagttttcaacaaaaattactatatatgcaaaaaaacaaaaaagagtataacccataatcagtaaaagagcaataatcaaaaataacttgtaaggtccaaatgttagattcagcaaatatttttaaggacttgtaataaattatattcaataaatgaaaaaatagtatgttcaaataattgaatgaaacagattaacaatgagttctcaaaaaagtataaaaagaccaaatggaaattctagagataaaaaagtaccatttaaaaatcaaggaattcactataggcattcaacaggagactcagatggcaaataaagaatctgtgaattcaaagataaatcaatataaattatatagtctaaaaaacagagaaaaaaatgggaacacaaattattcaacctttagacactgtaggacaatacagtgttccaacatagatgtaacaagagttccaaaaaaaaaaaaaaaaggcacagaaaagaaacatctgaagaaatagggataaaatcttccaaaatttaatgacgaaacatttacttacagattcaaactcaataaaccaccgaagtgaaagtaacaaagtgagtcaccactaggccgggcacagtggctcatgcctgtaatcccagcacttaggctgagatgggcgggtaatttgaggccaggcattcgagaccagcctgacccacacagtgaaaccccatctctactaaaaatacaaaaattagctgagcacagtggtacatgcctgtagtcccagctacttgggaggctgaggcacgagaatcacctgaacccaggagacagaggttgtagtgagccaagaccatgccactgtactccatcctgggtgacagagggagactctgtctcaaaaaaaaaagtgaatcacaactaaacaaaccacagtcaaattgctgaaatccaaagacaatgaaaaaaaccttaaaagcatcaagagaaaaatgactgatgacatacagagcaacaacaatgcaattcattgctgtcatctcatcagaaacaatggagtccacaggtcagggagatgacagtcaagtgctaacagaaagaaaactgcaatttaagttcttatatccaggataagtatcctctaaaaatggaagcaaataaaagtattctgagatgaacaaagactgagaaaattcattgctagcaaatatgccttgtaagaaataataaagcccaccaagatgaaagaatatactgtaaaaccactaataaaagataacctttaagaagaaaactaaaatcaacaggggaattttgatccaaccaaatggagtcagcccaataaagcctctctgtcccaaatattaataaaattataggggaaaaaaacacaaaaatcaacttcccaagtactctgaagactaaacaaaagcaggtgcattgtgtaggggagttaaaacttggagaattactcatatggatagaagaatcatttttttcctttctctcttctgaatctgcccctgtttcagggctggatgtcagaagctcgggtggcaaaattctaagaaaaactatgcttccagttagagaaatctagaaattaggtcctagataggagaagtgtggggaagaatcctaaatagcagagagtaagagaaaagggttctctaaatctgtgtaaaaacctgtgataaccccaaactcacccaagagacgcatgggtgtgggacaaacccaaatcagaatagacacctttctaaatttaattaccatccaattctcagcctaattcctgaatgaagcatatgtatgtgaggaaaatacaaggcaaactagtctgtctccctggatcgaaggggaaaaaccaaagaatgaaagaaaacccaaagtagggtaagagaggtttgaaaaatgaagggacactggaaacatcatgcacagagaagaggtggaacttgcagccccacccttaccaggttgtctatttgctaaacaacaacaacaaaacatgtgttagaggattataacagggcccagagttatgctctaatgcatccaggacccacaatattcaagacacattagaagattacgcaacatacaaagagccaagaaaatgtgactgtttctcataggaaaacacaaacaacagatgtcaatgagatgagcaaaatgttggacttatcacacaaagactttaaaggagatactataattatgctttagaaaataaaggttaacaaagtctaaatgaattgaaaaagttctccaaaaagaaataataaatgtttgaggtgatggagatgctaactaccctgatttgaatattatatgttatatgcatgtattaatatatcacaatattgcatataatatgtacaattattgtcaatttaaaatattaaagaaaatagagttctcatccaaaaatgaaagcataaaagtgaaccatattgaaattttagacttgaaatgcatactatctgaaacaaaatatgcaagagatgggttcaatatcaaaatgtaaaacacaaagaaaaagtccataaatttgaagatcaagtttattatacatatcaagtttctatgcacaaactacaatctgaaaaaaaacaagactgaaacaaactaaacaaatgcttaaggagttgcctgactctatcagaagatctaatacttatttctttggagacccaaagtgaaaggagaaagatataagtgaagcaaaaattgaaaaaataagaaccggccgggagcagtggctcacgggccgggtgtggtggctcacgtctgtaatcccagcactttgggaggccgaggcaggcagatggtcaggagatcgagaccatcctggctaatacggtgaaaccctgtctctactaaaaatacaaaaaaattagtcaggcatgctggcgggcgcctgtagtcacagctactcaggaggctgaggcaggagaatggcatgaacccaggaggcggagcttacagtgagccaagatcgggccactgcactccagtctgggcaacagagcacgactccgtctcaaaaaaaaaaaaaaaaaagaaagaaaaaaaaaagaacctacaacttctcaaatttggtagtaatcacaaagaaaaccataatgaacctatgaaaggaggaagagagagatggatgcagtcaagtgtgcctgtagtcccagctactgaggagactgaggcaagagaactgcttaagcccaggagttcctgggcaacatagtaagaccccaattctaaaaaacaaaaacctaaagaaaatgtcttgaaagcaagtgcagaaatctagaacattatatttaacaaagaaagatttcaataaccacagatttctcattggaaaccatggacaccagccaacagaagaaaaacacaggaaagaaaggaaaggaaaaaggtaaggaaaaaggaaaggaaaaaaatgattacaaacacagaattctacatacaacaaaaatatccttggagagtgaaggtcaaataaatatattttcagaagaaataattaaaaattgtttctgtcaaaactgctcaacaagttctttttcagcagaagttcttctaaaggaagttcttcaagaataaacagcaaaagaaactgtaaatacctggataaaagtagaaacttttttctctcttcaattctttaagctatatataactagtgaaagtaaaactttaagctatatataactagtaaaagtaaaacttattaactgtctggaggcgcttatgtatatacagacataataaggacaattgaggcagttaaagggatctgagcagttccaagggttctatactttatttgaagaggtaaaatattaacactaggtagactgtgaaattacatacactggcatctctagagcaaccaccaaaaaagttacacaaagagataaactccaaactcaaaatataaattttgagaatatttttaaaattcaaataaaaacaacatagaaaaagagaaacaaggaatatattacactgggataaatagaaaacaaataaaatggtagatgaaaataattacaatatcaataattacattaaacataaatggtctaaacatactgtaaaaaacctgactttgtcagactggattaaaataaataaaacctacaactattctgtgtgtattagctaggtttttccagagaaacagaaccaagaggatgtgcagatagagagagagacagagattgatttcaagaagtttattcatgcaattatggaggcttggtatgtctcaactcagaagagtagaccagcaagctgaagatgtaggaaagaactgtattctcagtacaaaggcagtcagccagcctaatttccttcatccctggggcaggtcagactttgttttattaaggccttcaactgattagatgaggtccagacatattacagtggataatctgttttactcaaagtccaccaatttaacctatttatgtctagtgttccattattggaacactaagcttgtgggagttatttatatcctactgctcaaggtcattgccaagatttgattttccacaaaaaaaaaaaaaattgcaacctctggcataaatggcttaaatgttaatctcatcaaaaaaacactttcaggccaggtgcagtggctcctgcctataatcccctcactttaggaggccaaggcgggcagatcatgaggtcaggtgatcgagaccatcctggccaacaaaaattagttgggaaccaggccacacagcaggcggtgagcaccaggccagcaagcattactgcctgagctctgcctcctgtcatatcagctgtggcattagattctcataggagtagaaccctattgtaaactgtgcatacgaggtatctaggttacatgttccctatgagaatcaaatgataaatataatgcacttcaatcatcctgaaaccacccccaaccccagtttgtggaaaaactgtcttccacaaaaccagtccctggtgccaaaaaggctggggacctctgttttagaatttatgggccatatcatctctgttacaactctttgactctgttgttatagcaggaaactaaccataggcaatatttaagagaatgagagtggctgtggttatagcaggaaagtaaccacagacaatatttaaaataatgagaatgacagtgccacaacaaaattttatttataaagacaaatcattatagaagagtcagccaaagaaagcaataaaaataaaatagaaaaaataaaaatgaatatgatcgagagcaataatggaagggcagccataaacgggaagaagaccttatctactactactgtactagaagtaagtaaacaagaacgtgctctaaaatacacctttggggaaaaaagatggaagttgaaataattccctcctaataggtctaatgaagtagatgaggctgtcactgctgacaggaagagttgtaaaaatttagaattgtatctgaaggaacaaagaaatgtttaacaatgatagaagtatagatcatgaatttataataatttcaacatacaacactgcatgacatttccccaccagccaaggtttagcttagagtgtgcctacctagactaatctaggatcagaattctcaaaagcaaatctaacaggacaagggcagacgggagtttttgttagaaaccacttccagcaaatagccaggctaagaaggaagtaaacaatggcagatatagtatgacacactaggattaaaaaaaagcaagatcacaggacagaaggtaactatgaggctgaagagcattggaaagggcgatattagaaaaagaggagatagatggttttgattaaagagtaagattggaatttaaaatttatgatgtgaaaacatgccagtgataaaaaggtctaggtttttaaaacaggaatggataaattacaaagaatggcagtaagggtagcaaagttaaggaattaaaaaattacaaaatgtgaatgttaagatgagttagtcacaaggacaatgaagttattcacatgtagtgaaactgagataagactgtgaaccaaaaattcacacactaagactaaaagtataaagtatagactttccttgcccagactttcaatagaataattcttcttactagtttttaaatgtctatgatactatcttgcaattatttttttttttaaaagtggtaaaatcctatacagtaaatcacaaaatacactaaagcacatccacacaaatacaggttatatccacagaaaataaggttataaaattagatactctggcaccaaaaagaaaaaaatctgccaagcctttacataaacccttaaatcttttttctgaaattcagttattagataggaaatgtgtacaaagaaacaaacaagtatttataagcctcgtttgttttgtgttaatatggctatcatacgacctatccattacattcctaagtatggtatatactcaagataaatgaaaacatatgtccatacaaatacttgtacatgaatgttcatagcaagcttgttcaaagtaataattattagacagtggtgagggaaaataaagagtactttgtttgacagcaaaactataaataaataacaaactgtaaatttacctcttacaatgcttaactttatgtgtcaactgggctaggccatggtatcaagatagttggtcaaatatttttctagatgtttctttgaaggtattttttggatgagattaacatttaaataagcagattttttgtatgtggaccttatccagctgaaagcctaacagaaaaaagcctaactgccttggagaaagagaaaattcactcagcagactgcctttggacttgaactgcaacatcaacccttccctgggtctccagtcagcctgcctatcctatggattttggatttgccagcttccacaattgtgtaaaacagttgcttaaaataaatctctctcgtgagtgtgtgcatggacacccacgcacacactattggttctgtttccctggagaactctgaaaataaaccccttaagtataatgaataaagacactttttatcttatagagaatgaacattaaaaaataccaaataaagaatctgttatagaagatcaatgtgtgtttgagcctaggagttcaagaccagcctaggcaacatggtgagactttgtctctacaaaaaacttttaaaataagctgggcatggtggcacacgcctgtagtcccagctactcaggagactgaggaaggaggatcccttgagcccaggaggtcaaggctgcagtgacccgtgatcataccactgcactccagtctgggtgacagagtgagaactgtctcaaaaacaaacaaaaatccctgtgtgaatttattataactagataattaaattagtttctgtagctgatgattaagcaaaactagttgctaaacttttcttgcccactttctcattaaacaaaagattttaaacttccttatacgtaaaatagaggtattctgtttttgttgttgatgactgtaatggaccaaatgtttgcatacacccaaaattcttatgttgaagccctatcattagtatttggagagggagcctctaaggaagtaattaaggttaaatgcggtcctaagagtgggtccctaatccaataggagtaacgtcattgtaagaagagacacgagagagctcactcatgctctctttctctctctgctacatgacaacacagcaaggaagaggatgtaggcaacccaagaggagagtcttcaccaaacaccaacccgactggcatcttgatcttagacttcccacctccagaactgtgagaaaccaatttttgttgtgtaagccatccaatctacggtatttgattatggcagcctaagcacacaaatacaatgttgagtcagaagtgggaggtggaggaagtgacattttaaaggaaggatagagagcttgtcttggatttcaattgaacactatttaatactatctaggacctaaagataattctgctaaagaagtcaacaatacagtagctctataatagcactcaccatacaaaatattggaatcatttatctgtcttcacaaatcaaatagtaacaaatagtaacacagcctctataattaaagattcattgaaaaaaaatgcatgattataaatgggtcttaaatcttaactcatttcatgctataaactcatttcatatgtaagtttaaataatccttttcatatttaagaagctttcaaatatttccaaactaatcccttatatgaaatagattaaaaactcttaccgtaacccattcctttggtcaaaagcaggaatcatagagttagggtgttctgacattaatgcaacaagcagctgtaggacatccattagattgtcatcctataatcattttagaaattttttttaaaaaatgaggaaaaaacaacttagttgaataatgaatacttctgaaatagaaatttcaacattagaaatataagtagacatatgtgtgatatatacttatttttaacaaattatgttctttaaatgtaaacattcacctctgtaactccaaatatacataaaatagcaaaccaatttctttttttgtgcgggggggcagagtctcgctctctcactcaggctggagcacagtggtgtgatctcagctcactgcaacctctgcctcccaggttgaagcaattcttgtgcatagcctccctagtagctgggactacaggagtgcaccaccacatctggctaatttttgtatttttggtagagacaaggtttcaccatgttggccaggctggtctcgaactcttggccttaagtgatctgcctacctcagcctcccaaagtgctgggattacaagttgagccaccgcacctgacctcaaaacaatttctttgtttttttgttttttgttttttgttttttgagacagagtcttgctgtgtcgcccaggctggagttcagtggcacaatctcggctcactgcaagctctgcatcccgggttcatgccattctcctgcctcagcttcccaagtagctgggactacaggtggccaccaccacgcccggctaattttttgtatttttattagagacggggtttcaccatattagccaggatggtctcgatctcctgacctcgtgatccacccgccttggccttccaaagtgctgggattacaggcgtgagtgagccaccgcgcccggcctcgaaacaatttcttcatcaaagaaataaaataccttttatgttatattgaatcaagattttgtaaaacataacctttagaaacagtatatccaacatgacttttttttaaggaaggcttatatatcaagaaattgtggggaagggttattctctattacagaaaaatatattagagcttctaaaatgctactaaatgttgcaaatctggtggtagtggtagggctaagatattatgtatcatttcttaaacttatctgatctggaatgttttattcactgtgcctctccagaaactagttctaaaagaacactttgtgggaaatgataaccggatcattttcatatacggtattatctattgtccctataaagataaagataaccaataaatgtttactcggtcaacataccactaatatgtggtagtatttgataacatttacagaataccagcacaagaaacgagttctagacccccaaaaaaacttcatgaaaatccttcactacctttgttgcatataccaatatgtatgcatatcattagagccaacttggacaatactgacccaaaaaggaaaaggcaaacagctaacagagtttagttaacttggttgccctgactctagttttccttcactgctttggaatttttgctgtggaagctacttgtataccgaattttcattaagttaaacagatgatctggagctaggacactgaatcattgaaagtgttatttagaggacctgaaactttcctaacaataaggaatcactgtgacttccagtttatctcatataaagtactttattcagtcccttagggttaataaaaacaaaatcacatatatagatcactatgaaattcacctgaaaacttcaaatattatatttggtcagaaaaatctaaaaattaatagaattgcctattcaagaggaaaaaatatcataatcattaatgattttaagtcaaatattactcaatcacaaaatttaagccattcttttatacctgaattaacaaagagatccaatcattatccctcatttaaaaattaaagaaggcactactccattctaaaatatatttattaattcacaaggtattaattataatataggagtataaattatcatttaaaatgctgtgatgtattatattccatcaattcctaagttttactaattataggtaaaaatctaactaaaaatagatgatttagttagattgcaactgacatatattgcattttcctggtgctaaaaaataaaaacagatatttcaacctatttaattttctttttatttttttttaattacacttcaagttttagggtacatgtgcacaatgtgcaggtttgttacatatgtatacatgtgccatgttggtgtgctgcacccattaactcgtcatttaacattaggtatatctccaaatgctatccctccccgctacccccaccccacaacaggccccggtgtgtgatgttccccttcctgtgtccatgtgttctcattgttcaattcccacctatgagtgagaacatgtggtgtttggttttttgtccttgcaatagtttgctgagaatgatggtttccagcttcatccatgtccctacaaaggacatgaactcatccttttttatggctgcatagtattccatggtgtatatgtgccacattttcttaatccagtctatcactgttggacatttgggttggttccaagtgtttgctattgtgaatagtgccgcaataaacatacgtgtgcatgtgtctttatggtagcatgatttataatcctttgggtatatacccagtaatgggatggctgggtcaaatggtatttctagttctagatccctgaggaatcgccacaccgacttccacaatggttgaactactttacagtcccaccaacagtgtaaaagtgttcctatttctccacatcctctccagcacctatttaattttcaacctccttttcaaacacataattttaaataccattataaatgagctgtttaatatctgaacatgtaaagtcagtaggaagattgtgttatgaatttttaaaacctaatcatttttagtcattttcgtaatctattttttcatttgttacactggtttctggaaatacactgaaagtatgctttggtatactttattattaattcaatgaaatctaatgttagtactttttaaagcctttcatgatgattctcaagattcatcttgtggtaataaaggatatttaaataaagattgctagggcttagttcctaagtagacacatttactccccattacagttacataattactgaagatttctttaaatttttacttttaaaaaagtctaatgtagcttcaaaaattaaaatttcaaaatataaaattcatatattacctcatgcatagtcagtaggtaattaagaatggcctgtaattcatcttcctttactccagaatccttcaaaaacataatacaggtatcttacgtttacatgtaaaaaaatgtttaaagagaaattatacacatagatttgtcaagttggtcagctactataaatataaaaatataatgtaatagacaatctaaatttaaaacaaaaatttggggaagcactaaagacatcagtactccagaacatgtagaggtcaattaacatcagcttcctgttttcaacaccttatataatatgacagcctacttactaaagctacagaatcctgaagtcagcaaaaataataagtaatgataacttaaaaagtaatatccacacctactactcctctaaatacagaagacatcttttcgactgaaattaaatgtggagaatacaatgaacagtttctgaaattatcaagttaaaatgtcaagtacctaaaaattaaatagtaatctcactcgggaaaagaaaaacacactgcacttctaaatatgagctcgttatgaaaattttcaacctactctatcagtatattaatcactaaaaaagctgcaatctaaaaaaaaaaaaacaccacaagaagaaaagaaattggaaaacaaaaaacagtatgcatcaggaacgagcaacaaaacaaagacaattcaaaggacactttttttaatacatggaaataaggtatctgaatctgaaaggtatactaaaagttaggttcacttgccataatcttatgtgacaactaataaagcattataaaatcatataggaaaatactgaaaaaatattggtaacaattacatttatatattgctatcttataaaaccaaaatgccttttttagaatattaaattttactttacctgtaatagaatgaaaagggacaaaatgtgaccacttctaaaggctcatacacctacctggtacatttatacagaaatactatttctcaaaatctgaatgtcagttacaaggagcctgctaaaaatgaaacctccttcaggagtttagtgccaaatactaacagaaacatagtaaatatttgctgaatgagtgaacacacttgagctactatacaaatttatataacataaaatacaactaccaatccctaattctgcaataatttacatccatataggctccaaaaaagaaccaaaacaaacatggaaatatctttcaaagtattttccaatgtgtaaccacagtaaccaagcaaagaataaaaaaaccaagattgtatttcatgtgaaattataaccttcaatacacggtatgctatggaataagcaacgtgaactcaccttcatcactaattgcttaatgaacatcaacaagaatgctcgtagagaaagcatttctttttgattaggtcgcggtccatcttttaaaaaaatatacacatacacatttagtatttaaaggacctcaaagctgtcaaagtataaaattctcattcccaacagcttttccatgtgtttgtaagaaatataaaggtaggtctcctacagaatgaccttttatgcctctagaaagacaagtgtttaatcttacatgcactgtatacacaatatttcaaacatacaaacaggttatgttgaaactactatgaagaagtttgtactttgaataggtcaaagaatgtccaaaacataaaaatgaggtaacaaataaaatttgtattcaataataatatacgtattttaagactctgagagtattagtaaggtaacagaagtttacaaagaaaaaaacaaaggaaaatctaaactttcaacattattattatatgtgaattcagtatgacaaaatttttctactgttatcattatataagctaatacagaaatctcaaaaagaatgcctcactacacgatatcattcatgaagaagggaaatattatgttaactgcctctgacatctccttctctgcttagaaaagtccttggtcacacatggctcacattaaatcaattttcatgtctcaaacatataattcccaagtagaaagcttttgaaaccaaacactcattgttctaagatcctaagttagggacctgttttctcatatattttataatttttccaccactaatcactatttatagatagttcttagaccaccaaagcataggaccaccatgactttgaacagatcaatgaaaataggaagaaaattgtttaaaatttgttccatgtgattcctagacaaaaaaaaataataagactagagttagaagaggatcacaaaatttgtccagctctctcatttgaagaatgagactttcccaaggtcactaatcagttataaaaggcaggcgagaatacaaaactagcacctaggacagtacatgatacacctacagcaccatgaaatagtcatgagaaaattctgacccggttctggatctgccacaaccttgccagcttaaaaagttcatagcttgctaaattataggtaccagattctctgaggctaaaccaagcttattttgaaagtgatataaaaagtagtatgcaaattgaaaatctttgtaaatcactaaacaaccaaagcctcttactgcaatcagaatgtatgttattgactccccagcatctatttcttaatttcaagcaacagctcttaatttttaccaagtgactgaagtcatcttcactttcagacaatgtctttcaacttaggggatgcctccatttctaagcaatcagggcaactacaaccacaaaaatgggcacatgatacaatcaaagccaatgagcaacagagagactaaaagagactttcactggaaatacattatataggcagatgctcttacactgaatttaagttgttacggatgtgaaaggggaccggctgcttgctactacaaaggaagcgaatatgtgaaaacagccaacacagaagaattggcaagtgcagtgagacaaattcagtcctatggtcatactcagaatacctttatcaagttgtatctggaactgccagtttatatgagctgattacctccctttttgatgtaagccagttccaaggagactgttatagttacaaccaaaagagccactatatgtcaaaagttttattttgaccccttatatgaactgctagacatgatgaatgaatattaccctttcagcaagttagtcctcattatgtaagaaaataattgctaacattttgtaatttcattatctctttaagagaagcagataactcctacttctgcaagaaaccaccatattcccaaaacaccattttcaaggaatctcattgtgacaatccatctcagcatcaattactaaaaactaattaagaatttcttggcattttcagtgtcttacaacaaccatcctagtcatattagctccccaaacaactcacaccagcacaagtagtattcttccacacaagtagcaagttattaaactctagaaaccacaatttaggacaaactattaacattatcaatgagattaaaataaaattttgccataatggaatatagaaaaactgcccaaatatatgatagtactggttaaaacaaaaagaaaaattaaatcctgatttgcatttgtgtaaagtaatatacagacagaaattatatacctaatccttttggggtgataccacttcgatcctgaggattcactgcccagtagtagtacttcagcgtgtgcatgatgagaagcactgttccaactctccgaatggtgttatatatgttgactgtaccaatgaattccgtggacagataagtatagagcatcagttgaacctacagaataaaaatgaagaacttagagaaccccaccagcattttatctgtttccagtaacacttccaggctgttttattttcaccacgcttcttccaaaaagtaagatgctgagcctgataataatatccatattagacaacacatactcactgacacacaagcacatgcacacacactccttataaaaccaaaccaggtaatttcttcttttatagcagcattatcaaatatggaaactttttgctgcattattccatgaaaataactttgtgattcctatttagcaatcagcaattattcctaagcatgtgtaacttctttataatagacttattacttatgctatctatgcatagttgtttgaaaaagctagaatttctttcaaatacaacatttgcagaaaatcaggagctaaaatgactcaaaagaaaaagtactagtaactcaaaaggaaaaaataaatagaacaaaaccaaaagaaagaaaaccacagaaaaagatatagagtttaccttgaagaatattagaaaaacagaattctattacagtagctcattacaagaaacattccaatctagcattttaatcataacattataatctctcaacatgtatatcatgtcccccaattaggaaaggattctactaatctcattgaaagtaaatagtctaaaaaaatacataagaagttatatatgtttatattaacttcgaaatatctcctcttcatatgtaagagaaagaaataatacaagtgctaccccaccactgcacatttcatcttaacaaaaaattggcccaccccagtgattcacgcctgtaatttcagcatgttaggaggctgaggcgggcagatcacttgaggtcaggagtttaaaaccagcctggccaacatcgtgaaacttcgtctctaccaaaaaatacaaaaattagccgggcgtgatggtacacacctgtagtcccaggtactcaggagactgaggcaagagaatcgcttgaacccaggaggtagagagtgcagtaagccgagagagcaccactgcactccagcctgggcaacagagaccctgcctcaaaaaaaacaaattttttttcagtgaaattatgggtctgaaactcatcaactataatccattacttaaagcagcaaaaataacgactgcttttgctctactctcatgttgaaatcaattcattttattgctagagggtatattttataagctgaacaactgtaagtataggatatatattcttcccttgaccatagaccaaactactgatcatttataactgaacctttatgttaccttcctggacaatgagggcattttccttttcaaacctgcaaggtacctcagtgtcacctagggatttctttagagagcaaaaagtaggtacctatcttccaggtgccctgcaaataaacaatcaaggctaaatgaattagagtgtcagtgaataaatctaacatgctaaaaagtggcaggttctgaaccacttaaaagcagggcttggaagatcattataattcacaaaaccatatatgtatctatacacatacaatacattgtgatctactgacctgccgcaaaatgttattttgatgtagctactgctgttcaaattgataggcccaatccacttgtcattgagacaatacgacatgcctcaaattcttaaccatgttatttcagtctcttagcaaatatttacatctaactatatgcataacactgtatcatggaaatacagtggcacatatgctgtccctaagtagctgaaatacagttgaaaagattaaaaaaacacttatatttaagcaaaacaaatcaaagacaataaatatgcctaccaaaacatgaaaaaagtcatgaagcaatatgtaattgagtgacatagagctatgaaatattattaattcagaggacagataaattattataggataaactgaaatagtaaagaaaagcttcactaataaagtaggcattaagataggctttgaagatgagtagtagaatagacagacagaatacaagaggaaatttcaagctagaaaaatgatggttgaaataaaggtttccctagagttagaacaacagttctcaatcttgactgcacattaaaataactgaaaaacttttctttttttttaatactgatgcctgagtcccatcccagtgaggcaggagaatagggtctggaggcagcgaacctaaggacttcctagaactaaatcaaatggaaatgctacagctatgacaggaaatatcctctccatttacatagggcatacaccgagtaaatgactttgtaactttactgtatcctcttcatttacatagggcatacaccaagcaaccaatggaaacctctaaaggttatttaaaccccagaaaattctgtaacagggctcttgagcccctacgctcaggcctgctcccacagtgtggagtgtactttcattttcaataaacttctgcttttgttccttcattcttcccttgctttgtgcattttgtccaatcctttgttcaagacaccaagaacctggacactctccacggataacaccagattgatgaaatcagaatctgcagtggaagtggtgggattctatttttgcttgtttttaaaaacctaccccaactgattctatcagcagtcaagactgagaaccaccactgtagggaaaccttttggtacctccctatccactgaggatatttccatttttaagctagaaaatctagaaataagaattgacatgaaatccttagataaaggactaactacttcgttctgagaacaatgggaaaccattaaaactgctggggctaagaaattataagagtcatatgttaggaaaatattggcgttgggcatggtagctcaagactgtaatcccaacactttctggggctgagagaggaggattgcttgaggccggaagttcgagaccagcctaaacaacaaagcaagaccctagtctctacaaaaaaatttaaagagttagctgggaatggtggcgcacacctgcagtatcagctactcaggaggctgaggcaggaggactgattgagcccaggagtttaaggtcgcactgagccatggccatgaaaagaacatgttggaattctggcagaatagttataagttagacaaagaaatggaaaactggagaaagtcagtctattgagaatgatactgtggtaaaagaaaaatgaacagaggctgggcctgatggctcacacctgtgatcccagcactcttggggggctgaggcaggtagatcacttgagcccaggagttcgagaccagcctgggcaacatggcaaaacatcatctctacaaaaaaatacaaaaattagctgtgtgtggtggtacacagctacagtcccaactactcaggaggctgagatgggaggatcacctgagctggggaggcagaagttacagtgagctgagatcccaccttagtgacacagtgagaccctgcgtcaaaaaaataagtaaacagaatttagtagcaacgtatagagatgaatgaaagacctcaagattactcatatgctaattatgaataaaccttccctcattcactcattatgtactccaatagccacacaaattgtgtgttaacatctgtctttcccactaaatctaaattctatgagggcaagtatcaagtctatcttgttcatcaccatatccacagtgcccaccataaagtagtcactcaacaaatatttgttgagtaaatgaaggaccatggtagacaagaaaattcatctctcctgctaggtcattaaaaagatgttctctgaacagatctaagataaatggaaattataaatcgctggtagctcccttttccaaaagcaaagcttttcacatccacacatccagaccttcaacttttaaccagaggtggattgaccacgaagctgataaagcttcaactttatgaccactgatctataaatgtttcttccaagaccctaaacctaattttgtatgcattatattgtattcttcttcttaaaaaatttcccacatgataaacatttgaccttcaagtcaaacaaaatttggatctgcccttttttatgactgtctttacaataaaataaaagcagataaaaccccttgtggatacataaagcagatggctaaaacaggagaaaatgctaatattatcaactcaactgcaaattctaaaaaggaaattgagaaaagttattaaaaagtagaagataagaaatagagtataataatactaggaaactaagaaaatcataagatgaattttttttaattcccctccaactaagtatctaataagaggctttctgaccacatcaaaagagacacaaagccttacaaatatgctgattagtaagacaaaaaagtatctagtaaaagattttaaaagtaacttgaaacaatcctcaaaaagaagtaagactgagggtcatggaagaaaatgaggtcaaatttgacctggagataaaaagctacaacctccaactgcctgtttcgattatttccaaatggcaatcagagtcagcagctgtttttctctttaacatttgaaaagaccagctgaaaataaaatattaagactctagaaaagcaaaaaagtctgcagacttttttctgacaactagaataagtaggtgctattccaacttaaacaatgataaacactgcaagtgggccaaaaggcagaaggggagagaggaaaactgggcttgaaataacacgacttctaacaaaaattgtagataagacggatacaattatgcaatttaataaaatgatctgtttcaagttatgcttaatactgccactactgaatttttaggacaatgtattacaacactaggatttattaaagattttgttcatataccttaccacaaattcatttacattcacatagaactaattggtttgttgttacaaaactgaaaaaaaaaatttgtacaaatgttttcataatttgaattaacgtgaaattaaaatgattacgagactagtatatcatgccttcaaagaaaaagtgacatttcagtggtacctataagaatgaaactcagtagttcatcatgttggaaggcaaaagtgtgaagtaaaaaagagagagagcaggagcagggtgagttcttaagaaataaaaaaaaaagaaaaaatatatatggatatttacaatggaacaaagctacagttactaggaaacattaataattacattaaaactgtctaactttgatttatatttagtaaatgaagtctctcccaaataaaactttatttcatttaatttcagaaaacaaagactatacctgtatcttttaaaataatgatattgtttacaaagaatatattctttgtatgtatgtatatattatttgtatatattcatacacacacacacacaatttgcaatttttcctgaagagtaaaaaaggatgcttagtcaaaaaaagcaatccactgaagtcttgcataatagtacataaaaaaaagaaaatcctcttaattatcactctcctcacgcacaaaaacagcaaagatagtaaaacaatatcaatatatagatatatattaccttggctggggtatgaatccatatggcaggattaagaagaacgtgatcacacaattgcttgagcaggggcatcccattctgcagattactcagatattttgaaaatgcaaggcaaagttcaagtactgctctgctaacatgagatttggaagactgcaaaaaaagtagttcaaatgttaccacaaattcaagtcaaagtaagtgaattacaggctgtccctaccaggaaaaaaactggcccacaaattatgctcaaagttaaagatgccatgaagctcactatcacatttgtttgatagaggaatggaggcaaggtaaaacaacaaaatgttattttagtttaggtaattttctgtaaccaaggagacattcttgcagacagaattccttagccacttagagaacaaatgtatggcctgtaaattaagaatcaaaaacataaaatatttcatactttaccttttcaaggctatatcctattaccaagaagcccttacaggcaagcatctgttcctgcatagcaattgagttcttcaacaattccatgataaaggccagcaaggttgaactagaattttttaaaaaggcgatgattaaaaaaacatattctattttttttaaattaggttagatagatgtaacccttccattcaccttaataaaaagttctccatttcaaagaaattgaagctccactaaaactgcttccaacattacatcagaactagatttttaatgtaggattaggagttactcagatatttatttcatatactttatctcaaacacattgataggtgaattacttagaaacaatgacaaatgttcatgatatagagaaaaatgagcaacttccaaaaacaaccaataacaaatacttattaaaaatacactaaggccttaaagaacagatataacttagataagcaagtatattcaactttgaagcgttaggggccaaaaggtgagaaaagacagtggagcaaacagagtaaggtgtaaatcctcaaaatgtgttagggctccagacttgcatagtctgaatggagcagagggcacatgaagagaaagatgagacagttaacttggaggcaaacttgagctccttgaacactaatttaagaagtttgttcattatcccaacaacaaaattgtaattctccagtcagtctcgaacacttttaaaactgaataggggctacagccatgctctactacctacaatttttaaagatccccggaaaggaaaggaaaaagatcagttgttactgccttctcagagagaagtcccacaaaacaaaaaaaaagagagagagagagaaagcatgaccagcagccaatctcctcctccacatcagtgctttcactgccagcaatttcaatacggggggaggggggagggagagggagaggggagggagggaagagagaagggggggagaggggagggagggaggagagaagtgggggagagggggaagggagggagggggcagagaggggaggaaggggaagggggagggaaggaagggagggagggaggaaaactgtaagtaaaccctgttagaacacagcacaaaacaattccataaagtattaatatgtcagggtaatttaattttatattttttaaaatataagttgacaaatactagatttgataactttttatttttaaaaaaattgttgcctgaaaataatgaggacaattaccattattatacacactggtggcagacatcaagttatgtataaaagcaaaaatcaaagggagaatttcaaaatgagagaatgtaaaagtatttaaatttctcaagtaacaaatgaaacaataatttcaatacaaatgaaacaataatttcactatacattgtttcactagaatatatagccatgagaaattgagactcctttcctacattttatgacttaccctataacttatatccctttcttttttagactcaggactacaacacaagagacaaaaatgtgctaaatgtacaatctaatttttttcaaaaagactaattcacttcgataacactattaaaattttgacttccaattacataaatgcaatcagtaataaataattaaaatatgaaaagttaagttccataataaatcattaccaaataattttaaatatttcagaaattaaaaatttcttattgcattctgagtaatgggtagtaaaaaaaatttttaatttagacaaaaaaatgtatttatttttgagtaacccattattgccatttataatgttattctaaaaccaatttattgtgtttcttacagcttccatatttcctactgataaacaagaacttaagttaatactgacataattaatatggacttgtaatacagtttatagttcacaagtttaaattattttgacacaacaaaacctgaaaggcaaaatattgtatagctcaacagtgatgaaattaaccctcacagccaattaaagaaacaaataaaggcactcaccatatagtcaaatcaatctcatcagacaaatattgcctgtaatccaactgtgcaaaaagtggaaatagtacttgtactcctccaattgaatgcattgcactttggatggaatgtgttaaaactgcctttacatccttgtaagatcaaaaacacagtaaagagttcaatgattttttttccaaaacaattaaaaataaggcacaacaataaatgcagaaacactataaacgtgacattccatgtgtttaacagaagctaccaaatacatctcaataacacatcaaaaattaccattataaatgttcttaaaagatcacagttagtacctggagcatgagtgcatgtggtgaatgaacaaaaattgaagggttgtccttaggagatgattcaagacaaagctgggcatctgtagcccgtggattgtacgtgaatgcaatggcactagagagtttcccatcgtacaataaaagtttgtgatgctcagcaaggaaaaggtcgctttctgctttgaatttaaatgtaccctaagaattaattaaaaacagttaaatagtatgccacaaagagaatctaagtacaaatcaacacaggtgtaaaactttaaggagacagaccattgataatcttttaacagtattatataagaggacccctcgtttacttctaaaattggctgaatttaaagatataatggaaatcaagtcaacttgacattaaaaccttaccttaaaaatgtagaagtgaccaatagatcatattttatcttttttcgtatattctttttttaaaattgtgatcaaaagcatataatatacaacttaccatcttaagtatttttaagtgtataattgagaaacattaactgtattcatattgttcaacagcaaatctctagaacttttatatcttgcaaaactgaaactctgtagccatttaacaactccccatttcctgctccccaccagcccgactatcacaattctactttctgtttctatgagttggactcttagatacctcgtataagtggaatcatacagtatttgtctttttgtgacccaagcatttcatttagcacaatgtcttcacagttcctccatgttttagctgatgacaggatttccttgttttttaaggttgaatatggtcccgtgtgtttatgtgtgttgtctgtcacattttctttatccattcatctgctactggacatgtgggttacttctatctctgggttatcgagaatattactatgaacatggatgggcaaatatctccttgtgaccctattttttgtgtgcaaatacgtctctgtgatcctcttttcaattattttgtatatatcccataagtgagattactggatcacatggaagttctatttttaattttttgaggaacctcatattgttgtccatagcagctgcaccatttttcattcccctcaacagtgcacaaaggtaccaatttctccacattctcaccaacacttgttattttgttttcttttttaagtagtcatcctaaatgatgaggcaatagctcgctgtagtttaaattagcatttttctaatgtctagtgatattgagcatcttttcatatgttcattggctatttttatatcttctttaaagaaatgtctactcaactcttttatgcatttttaattgttttgttattgttgttgttgttgagttacaggattcatatattctggatattaactccttatcagatatatgattgctaaatattttctctcactctgtaggttacctttccactctgctggatatttcctctgatgcgcagaactttataactttgacaacatcttatttgtctgttttggctttggttgcctgtactttcggtatcacagtcaagaaatcactgccaaattcaatgtcgtaaagcttttcccttgtgtattcttttaggagttttatagttttacatcttacttttaggtctttaatccattttcagctcatttttatatacaatgtacaatatgaattaagtataaaacttttctttcttatttttcgcatctggatatccagttttcccaacatcatgtgttgaacacattgtcctttccccagtatgtggccttgcctcacttgtcaaagatcatttgaccgtatatgcaaaagtttatttccggacactctattgtgttcccttggcctatgtgtctaagcaagtctaacgttgttttcattatgtatcatagccttgtaataaattttgaaaccctgaagtgtaaagcctgcaactttgttcccctttttaaatactgttttggcttctgagaatcccttgagattccacattaattttagaattgtgcttctatttatgcaaaaaatgccattgggattttgataagaactgtactgaatctgtagattgctttaggtagtatggatttttagcatattaaatcttccaagggatgtctttacatttgtttcggtctcttaaattttgtcagcaacattttgtacttttcaatgtacaactcttttgcctccttggtggagtcagggtacagctcttttgccaccttggttgagtttatttctaagtattttatccttgttgatgctattgtaaaagaaattgtttgcgtaattttcaaactgttcattactacttcattattactaatagaaacacaattgatttgtgtgtattgattttgtgccttggaactctgcagaattcatttactagtcctaacagttttcagtgaaatctttaaggatttttagatataaggtcatgccatacgccaacagatgattttacctcttcccttccaatttagatgccttttctttttcttgccaaattgctctaactggatttccaaatactatgttgaatagaaatggaaagaataagcatccttgctttgttcctgattttagaggaaaaactgtcagtttttcactgttcagtattgtgtcagtcatgggcttttcatatacaatattttattatgttgaggtagtttccttctattcatagattgttgagtgttttaggttttttttaaatcaagaaagagtgttgaattttgtcaaatccttttctgtatcagttgatatatgatcatatggattttgtaattcactgttagtgtggtacattgcattgactgatttccatgttgaaccatctttgcattccagaaataaatcgtaatttgacattgtgtataattcttttaatgtgctgttaaattcaatttcttagtattttattgaagatttttccatcaatattcatcagggatattagtctatagttttctttcttgtactatcttgatctggctttggtatcagggtaacactggcctcataaaatcagtttgaaaatgttccctactcttaaaatttttgtaaatttgaggagaattggcattaattcttctttagatgactgagagcattctccagtgaagccatctagtccctggctttctttgttgaaaagttttttattattgattcaatctccttactagctataggtcttttcggattttttaaatttatttttgattcagtctcagtaggatgtatatttctagaaaattgtccatttcttctaaattatccgatttgttggcatatacttttcatagcattctcttataattctttctatttctgtggcaagttataatgcctcctccttaatttctgattttacttatttatgtgctcttcttttttccttagcctatgtaagaatttgtcaattttgctgatgtttaattaaaaaaaaaactgttagtttcactgatttttttctcactgcttttctattttctattccaggggtccctaaccaggtatatgacctgttaggaacaacagcaagaagtgagcggtgggcaagcaagcaaagcttcatctgtatttacagccactccctaccactcacattactgcctgagctccacctcctgtcagatcagatttttatagaagggtgaaccctattgtgaactgcacatgcaagggatctagattgtgtgctccttatgagaatataatacctgataatctgtcactgtctcccatcacccccggatggaaccgtctagttgcagaaaacaagctctgctttgtttcccactgattctacattatggtgagtcgtataattatttcattatatattacaatgtaataataacagaaataaagtgcacaataaatgtaatgcacttgaatcatcccgaaaccatccctgctgcgcccccaccacccgtggtccatggaaaaactgtcttccatgaaactggtccctgggaccaaaaaggttggggactgctgctctatttcatttatttctgctcggatttttatcatttccttctatctgctaacgttaactttatttgttgttctttttccagttccatgttgtataaattaggttgctgatctgagatctttcttttggtgataatgatcagtcattatcaccataatcttctctcttagactgaggtcactgaatctcgtaagttttggtaggttgtgcttacattttgatttctctcaagatattttctaattttccttgtgatttatctttgacccaaaggctgttttaagtgtgttgtttaatttctacattaaacattttctacattaaaaacttggtggactttccagtttttctttggcaactggtttctagtttcattttattgtggtcaaaaaagatacttggtataatttcaatcttaactttgttgacacttgttttgtggcataacacatgtctatcctggagaatgttctgtgtgtgcttaagaaaaatgcaggtcaggtgcagtggctcacgcctgtaatcccagcactttgggaagccgaggcgggcggatcacctgaggtcaggagtttgagaccagcctgaccaaaatggcaaaaccccatctctattaaaattacaaaattagctgggtgcagtgccacatgcctgtaatcccaggtacttgggaggctgaggcaggagaattgcttgaacccaggaggtggaggttgcaatgagccaagatcatgccattgcactccagcctgggcaacaagagcaaaactccacctcaaaaaaaagaagaagaagaagaacaatgcacattctactgttgtttcatcgagtgttatgtatactactgctaaatacattgggctgcattgctgttcaagtcttctgtttacttattgatcttctgtctggttgttctattcattattgaaagctgaatactgaagtgtcctactataatggtgttgctatctacttcttttaattctatcaaagtttgcttcatatatttgagagctctgatgttaagtacatatatttgttctatctttctggtgaactgaccctatcatcataaaatgtccttctttgtctcttttgacagtttttgacttaaagtctattttgtctaatttaagtaagctactcctactcttctctggttaccatttgcacacatctctttatttgtgggtacattttaggtgtatatatttatggggcccataaaatgttttaatacagtcatgcaacgtgaaataagcacatcatggagaacagatatccatcccttcaagcatttaccaatttagttgaaaaccatccaattacactatttcaaaatgtacagttattattgactatagtcaccctgctgtggtatcaaatagtaggtctcatttttcttttttttttttgtatccattaaccaaactctccatgtataacccaccttcaaatcaagctgaactaacattggttaagcacaaaacagtaagcaaactaccttgtatcccaggcccaactgataaatagcaaatatctgagctgcatttagagcttcactgaaaaggtaaactgcagtcatctgaccacagaatactctattagcatctgctgtttctgatgagcccaggaaacatttgtcaaaggtctgtaaaagaaaaaaaaaaaggaattaggaaaaaacaaaaaaaaactccagaaataataaaaacctatattatcataaatgttttgtccattctaaactgtatctaaatagactaacataatttataccataaaaccattagaaagaatgttgaaaaatgtgtatgtaatgacattaggggatatagaaaagtttgaaacacatgtgttctcaagccaaacaacctagatcaaatccctgcatcctatgccactgagtatggcaagttacttaacctctttgtacttcacctatctgtaaaatgaagattataataatgcttatcttgcaaggttgctggagctttttgaaaataaagctatttattacaatgcctggaatacaaaaagcactcagtaaaagttaatgtaagaaaaaacaggttacaaaacaatacttacatatgagcccttttttgtactaaaaaagagctaacattgagcactcattctgtataaggcgcgctgctaatagatttatggatattatctcatttaatcagatgacaactttctgaggtatgaatattttatgtccattttcaggaggaaaaatgctaaggcctaatagattaggtaaggtcatgcagtcaataaatgacagagctgagattcaaacctaagtctgtctgattcaagaccctgatctcttgaggttagcattacaaaatatgtatatatgtgtagcaaaggatatgaaaagaggagttaatggtgtgtgggtagtgtactttatgttcattttcctggtatttttcaagtttttataaaaagaacataattacaggaaaaacattttaaatttcattctaacctatagatttatttttgaaacctgtaaacgttaacaacatactagttaactatagcagttagaattatatgcaagatttataagcatgcatcatttaactcattcagaaaaatgatcagaaccctatagtggagctcttgttcattttgataaatgaaccaatgacccactccccagatatagccactgttagctataaatccttatttctacctatatggaatgattttataacaaggactaatatttcagtgacatattaagttctattaacatgctagccaaattatgtttataaaaatctaccattgtaatactttgaattttatattcaagttgtaaaactttttcttgtttaaaaagctcatgcttttaaaatcacttttttcattgcaacattttgaaactacttacatcgctagtgttgacaaaccatgttatctctccataggaagccagctcaccattcacataacatcgaagttcactattcttccatcggttatagatgtgtactatggtaaccatataccactgcagaagcaaaaaacagttaaaaatacaaagataacaattatcccaataacgcaaccatactgatgagtaaaagttaaatgataagttgtaattcaacctaaaaataaaacaagactacctttgttaaattcaatatttactttctggaacaatatctattcatgggcctttcaactgataagaacttaatcactagatcatttttccagctttttattatggaaattttcaaacataccccaaaaatctgaaaatcaagtacaaacaccccctttttccaccaactagattccataattgtcaattttttgccatatttgcttaatctatctgactacctatctacttatacattttgttgatgaaccatttattaacctctaaattttaaggtacaaaagcaaacacatattaaatttgcaatactaaaataaatgccgtagatatttcctacttgtatctcccttaatctccataaataactaaatttgcaatctttttcatatccaaatcagagaggtcaattattcagtgatttacgcttcatctttttaaacagtaaaaacgaagttgtgctttagcatgttattatatgaataacattaaaacaaagcattttgatgactagcatagcttgttaacataactatgactcaagaagatcatgtaccttttgtggcttgaaatcaaatttcacacagtgttgaaagccttttccttttgactttattgatgttacaatcaaacagcctccaacaaaatgagcagaatagccaagacctttgctggttctgaaactataaagaatagttttcattttacctctaaatattcttctcagtttcaaagtaaggttttaacactaatcagttacagaaatacataccaatacaaatatggtttatccttatctacattgatgttatttacaggatccattctaagccatgtatgaaatgtaaaaccattctggtatggccatttggctataggaggtaatgcaatagcctaaaggaaagaaactttgagttattaactcacgtgaaaacctgtcttattaaaatcatgaaaataagactttgcaatgctacatatatttgtactacatcacattactttatgtcacaattaaaatatctgaggccgggcgcggtggctcacgcctgtaatcccagcactttgggaggccgaggcaggtgcatcacaaggtcaggagattgagaccatcctggctaacacggtgaaaccccgtctctactaaaaatacaaaaaattagccgggtacggtggtgggtgcctgtagtcccagctactcgggaggctgagacaggagaacggcgtgaacccaggaggcagagtttgcagtgagccgagaccacaccactgcactacagcctgggcgaaagagcaagactccatctcaaaaaaaaaaatatatatatatctgaaagaagactctttatctggaagaagactctttatcaggaagaagacttttagtaactttttaattttccctaatacatagtaatgttaattaaatgaaaaaaaaattcagtgtaacctggacacatgaatcttgtattcttcatttcttaaaatgaacgtatccacagagattctaattaaaagagataggaagtgataacaaattggaaatttgatgaaattttaaggtattagaatagagaaagatggacaggaatggaaagagagaagagaaaaactgggtatatgctgcttttataaaactacaaatataaaactgaagaggattagttcataatatttttaaattatattcagaagtcaatatacaaatggctttaccgcttggtttagatttttatttaaaagatcatactacataataaaaggatcttgtatagccaaaacaatcttttaaaaagaacaggccagatacggtggctcacacctgtaatcccagcactttgggaggccaaggcaggcagatcatctgcggtcaggagttcgagaccagcctggccaacatggtgaaaccctgcctctactaaaaaaatacaaaaattagccatgcgtggtggtgggtgcctgtaatcccagctactcaggagggtgaggcaggagaattgcttgaacccaggaggcagaggttgcagtgagccgagatcatgccattgcactccagccagggtgacaagaacaaaaatctgtctcaaaaaaaaaaatgaagaagaacaaagttagaagactcatactaccatttcaaaacctaccattaatataaagcaacagtgatgaagactgtggtattagcataaggccctggtgtcctttggttaggcaaatccttcttattatgtcaccaaaaggacaagtgacaaaagaaaaaaatatatacattggactttattaaaattaaaacctgtgctttaaggaacaccatcaaaaaagtgaaaagacaagccacaagaatggaagtaaacatctgcaaactgaatacctgataaaggacttgtaaccaaaatatataaagtactcttataactcaataataaaaggacaagtaaaattttaaaatgggcaaaagatctaaatatacatatctccaaagaagatatacaaatagccaataaaaatataaaaagatgctcaatatcattagtcataaaggaaatgcaaatcaaaactacaatgagatatcacttcataccaactaggatagctactaatacaatcacaaagacagatactggccgggcacggtggctcacgcctataatcccagcactttgggaggctgaggcaggtggatcacttcaggtcaggagttgaagaccagcctggccaacatggtgaaaccctgtctctactaaaaaatacaaaagttagctgggcatggtggtacacatctgtaatcccagctactcaggaagctgagacacaagaatcgcttgaaccgggaggcagaggttgcagggagccaagatcacaccactgcattccagcctgggtgacagagcaagacttcatctcaaaaacaaacaaacaaaaatagacattaaccatcttagcaaggatgtagagaaatttgacccttatacattgctgtgggatcgtaaaatgttacagctactttggaaaacagtctggaagttcatcaaaatgttaaacaaagaccatatgacctaatctagagattgggacaaattaaaacatatgtccacacataaaattgtacactaatgtccataacagcattattcatactagcccaagaagtgaaaatcccaaatattcactagttgacaaatgattaaataaagtatggtatatccatacaatataataccagccataaaaaggaatgaagtactgatacatgctgtaccatggatggaccttgaaaacattatgataagtgaaaaaagccagtcacaaaagaccagatgttgtatgattccactaatatgaatggtccagaatagggctggggaatatggggagtggctgctaatcagtatggggtttcttttgggtgtgatgagaatgtcccaaaattgactgtggtgatggttgacaactctgtgaacacatttacctactatactatatactttaaatgagttaattgtgtggtatgtggattatatctcaataaagctgttttgtaaaaaattcaaactgcacaagtgtctgttttattgtaacttacatatgcatttatgtatacatattatacatatattcttttatatgtattagataagacataaaacatgaaagacatcatagagccaaacttcagtaataacactattgagacttcaagagtgaacgttgcattaaacgttgcattaatgcaaaaatgaacgttgcattaagaaaaaaggaaaagaataattacaactcacagactgacaaaaaaaaattttaggagaaaaacatatattcagtgcgtacacatgttctctctcaccaaaaacgatagcaaagatgtaaaagctttgcaaaaatactttattcatgactactttaaattcccagtaaaagctatgtttaaggaaaggaagtcactaaacatatttaaaacatctattctcttcaagtttcaaaagctgttcagctcacctgccctactttcaagataaatgcatgcactgcaatctcagaactgtaaataataaaattataacatgaggcatgaaaaaggttaatctcataagaacactttttttaatgttagaggcaatgataggctatgataagaaagtaaaattattctgaaaagctacaaatctaaaatcgactgtaaggaaaaactgtaaaggaaaaaattgggcaataaaacttttcaaagaaagttgtatattgtgtatataacatttaaatatcacaaatgtcatattaaaacatattcttatctttctgcagatactgccaggctacacagggcctaatataagattttatgagaactaacataaaaaaaagaatgaaagataagctcaggaaaagaatagactgaaatatcttttttaaaagtttgtcttgggccgggcgtggtgactcatgcctgtaatcccagcacttcgggaggctgaggtgggtggatcacctgaggtcaggaattcgagacaagcctggccaacatggcaaaaccccgtctctactaaaaatacaaaaattagtcaggcgtggtcgtgggcacttgtaatcgcagctactcaggaggctgaggcagaagaatcgcttgaaaccaggaggcagaggttgcagtgagccgagatcgcaccactgcactccagcctgggcaacaagagcaaaactccatctcaaaataaaaaaaaagtttgttttgcttgtaacagactgaccaatgtaataatgaggagattttagaaacttccataaataacatatatacattatagaatgtgcttctataacattacgaaacattacagatatcactattatacataattgtcttatgtataaactgattaacggcttacaggaacactgagaccaacataatttggaaactcacaagtcaaggaaaacttgcgtagtaagtttcagagcctctatttcttcactatcattctatacacaaggtacaaaaaaaaagacaggtagagtaatgaaaggcaagagaaagatgttcacaaagatagacatgaaggtgttacacacaaatagctacttaagacaacatggctatgtttaaaagaatgaggttcttattccattgctgacccaagctgtgactgggcattttctcaactaatttaagcctctatttcttcacctctaaagcaattacaaaaaagtaacatgcacgactatcataaggattaaagtatgttgagcagaagtttctacctagcacagaacctgtcaggggtgttcacagggctgtactttcagggagcaaaggaaagaagaactgggagtgatttcctcattaatatttacttactgcagcactctttcctggaaagttaaaaaaggcatcaggaccatacttctgaggcatatgctttaacacagacagcaacttcccagcatgtggaggctatgaagataattaacaattcattaaccacattatttaccataagataaaaaaaacacatctttaatatagtcttgctgtaatatatacaggaataatgctataaggttaaaagcatagaaaataatttctaagttattttcaaatatcttaaagaaataatgtactctacaccagtttttgtaatgctgtagggcctattaggtattcaataaatatgagccagtatcattagacacctgaaactcttctccaagctgcagcaaaaatgatcttttttttttcttttttgagatggagtctcactctgccacccaggctggagtccatgtgcagtggcgccatctcggctcaccataaactctgcctcccagattcaagtgattcaccagctgagtagctgggattacaggtgtgtgccaccacacccagctaatttttttttctttcgagatggagtctcgctctgtcactcaggctagagtgcaatggcatgatctcggctcaccgcaacctccgcctcccaggttcaagcgattctcctgcctcaccctcccaagtagctgggattacaggtgcacgccaccacacccggctaacttttgtacttttagtagagacggggtttctccatgttggtcaggctggtctcgaaccaacctcaggtgatccacctgcctgggcctcccaaagtggtgggattacaggcgtaagccactgtgcccggcctatattttttgtatttttagtagagacagggtttcaccacgttggccagactggtctcaaactcctgacttcaagtgatccacctgcctcagcctcacaaagtgctgggattacaggcatgagccaccacacctggccaaaaacgatcttttaaaaatataaactacatcaatcccccacccacccttctttaaaattaaaaatacttaataatttaacaaatacttaaataatgcttactatattccactgttaaaggtacttcaaaaagatacttgcacatgcatgtttatagcagcacaattcacaattgcaaaatcatggaacctacccaaatgcccatcaatcaacgagtggataaagaaactgtggtatatatatatatatatatatatgatggaatactactcagccattaaaagaaataaattatcagcatttgcagtgacctggataagactggaaactattattctaagtgaagtaactcaggaatggaaaaccaaacagtgtatgttctcactgatatgtgggagctaagctatgaggacacaaaggaaaaagaaagatacaatggactttggggacttggggtaagagtgggaggcgggtgagagataaaagtctacaaatatggtgtggtgtatactgctcaggtgacgggtgcaccaaaatctcacaaatcaccactaaagaacttactcatgtaaccaaatactacctgtaccccaataacttatggaaaaataaaattaaaaaataaaaataaacatttcaaaaaatggtacttcaaaaacactaaaatattttaacctcataaccaccctatgggatggtattattatgattatccgcagtttacagaagaagaatctgaggcaggggaacatttccaaagtcacatgggtaataactgtcaaggtcaggatgagaactcaatcttgactccagagtccatgcttttaaacaactatacagatgctcctcaacttacgatagggttacatcctgataaacccacagtaagttgaaaagaatgtaaatcgaaagtatgtttttgatccaaaatattgtcaacttaagatgggtttagccggaggtagccccatcctaagtgaaggagtatactgaatgcatatcactttcacaccatcgtaaagtcaaaaaaaaaaaaaaacaactatactttcaccattaaaatagggaccaaaacctttaacatggactataagatactttatctacttctttagcctcattttgcttcttactctccccttctccctgcactccatccttttttcagtcttcttcccacaacagggcctcagcaaaagctattccttatgcttaaaatgttctcaaaaggacccctgtactcccctcttatccaagtcaatcttacccagcctttagagctcatcttaacagtcacttcctcagggtagccttccttgaaactgagagtggattaaacttccctatcatatttcattctacaatatacctttaccgcatagcatataaatatatgtatacgcatagcatatacatataaaagctgcaacgctgagtttatttgattaatgtttccttggtccacaagtctctaatacatgaaacaaccaacaataaaaatgaaaaatctcatttgcagttacaaggaaaaacaaaagataatcagacatactatctcattttaatcagtttataaccaaataagaaaagtgtggggcattcctccttgttaaaaatgtaaaagttcaaaacagggtcaaactacaaatgaaatcattggtttgccttcatcttatttttatagatgatataaattataattactacctgtgtaaaagagtttggcaacctttcacctaaatattaagtggaagcttcattcttaagtgaacaagaaattttcaattaaccatactgctcaattgtaaaagcataataacaagtaactacaatcacagtgattttttaaaataaattccaaagtaaaataaagtaaccaaaaataactctgcagttaaaaataaaaatacagtattatagcatgtccatctagaaacatcattcctccaaatttcctttcctataaatcagtcaacaaaagaatacattaagataagcactttacttgacagacattgctgggggagtgtatactgtactggtaaagcctttcagaaaaaaatttagtagaccaggcacagtggttcacatctgtaatctcaacactttaggaggccaaggtggagggatcgcttgagcctaggggtttgagaccagcctgggcaacatggagaaactccatctctagaaaacaatacaaaaattagccaagaatggtggcaagtgcctgtggtcccagctgcttggaaagctgaggtgggaggattgcttgacccaggaggcagaggttgcaggcagccgagatagcaccactgtactccaacctgggtaacagagcaagactctgtctgaaaaagaaaaagaaagaggaaaagaaaaagatgtagtagtcatatttcaagagtccgtaaagacgttcatgtccaccaatgcaatatttccacatgtaaaaatctatgctaaagtaatcaccacaagggcagacagagatttagatatagggattttttcactgcactgctataacagcaaacgatagaaataatatgcctaatattaaataactaaataaacgtaatgagtatctgagcaaggccttgctctcattttataaatagttcattattttttccctttatcatctaaaactattctcattctcctccccctccccataggcaactatattaacatgtttaatcttttttatgtagattattccttcaaaaataatgtttggggctgagtgtggtggctcatgcctgtaatcctagcactctgggaggactgcttgagctcaggagtttgacaccagcttggacaacatggcaaaacccagcctctaaaagaaatgcaaaaattagcctggcatggtggcacatgtccgtggtcccagctacttgggaggctgaggtggatctcttgataccaggaagctgagaatgcagtgagccatgatcacaccattgcactccagcctggatgagagtgagaccctgtctttaaaaaaaaaaaaaagaaaagaaaaaaaggtttttatgtgcttacacttatcattgctttctttcctatatattttacatctattcctattactccatgtactgattctgttatagaacaatctaccttctatacattttaccaatccactctcttaatgatgaacatccatgttaacattcactgccatcaaaaataatgcttcagtgaacatcctcatgtattttatggatctatgtgagaatttcttggaatacgcactcagaagtgaattattaaatcactggatacaggtaaaattaacatgactaagtagcactagactcctcttgaggttggctccactggtgttcattctaatgaaaagcgcaccaagtataaaataaccctatatcccaaactatacttgccattttccaactttaaaattcttgagaaactacagatggaaggtgacaatatcaatactgttttaatgtgaatgtctctaattattaatgattttgtgttcatttggttgtggggtttctacctctgtaaataaatattagttcatattatttgctattttcttacctataattttctatgcttatgaatataataaaaatacattacatattcagaataaataatgtgaatataaataaaaaccaaaatcaaatatatactttctcttctggacacgacatattaataggacctggacttaccaacctaccataaacaactagaaaagtgggcaaaatgtatcaaacaaaaacagttttcagtatgcaggaagaggtagctcaagactgtgttccctgagaaaacaaaatgacttaaacctggagtcaatttccatatcattgcacagggaaaccaaacagaacccgaaagtctcagtgagttggaaagaaagtggagtccacagaagatagaagtttcagagaagaatactagggaggaaagaactgaacagacaagaagctccagaaatctgcattgactctttgacttaataccagactgatcatgcttatgataaaactcaacatggtggggctaagatagtaagagctttaagttaaagaattcccaaaactaatacagagctaggaattgttgagaccctactagacacttcggagagaccacagtcttgctacctcctgtcctatgtctgagacttgagagttattcaatagagaccctctaagagacacgcctgaatagtaaaactaaactagccgtagcgtaacagccactctaaaccttactggaaaaaaaacttttaaactagttttgaaggataaagttgatccacaaataacttatctgcctacaaaaccagtctaacaatcttaaaaggaatatgacaaaatccaacactcagcaacataaaatttgctatgtctgatatattgtctaaattcagtagccataagcagcagaaaaatgtgacctacataaaggagcaaaatcaatgagtaaaaaactgacctagaaaatgacattctagaatgaaaaaccaagagcattaaagcaactattcatatgctaaatattgtcaaggatttaaaggaattaaatgagggaaaaaatggaaaatatttaaaagaaccaaatagaatttacagaaagagaccaggcatggtggcttatgcctgtaatcccagcactttgggaggccaagacgggtggatcacaaggtcaggagttcgagaccatcctgaccaacactgtgaaaccctgtctctactaaaaatagaaaagttagccaggcgtggtggtgtgcgcctgtaatcccagcaactcaggaggctgaggtaggagaattgcttgaacccaggaggtggaggttgcagtgagcagagatcgcaccactggacgttagcctggcgacagagcaagactccgtctcaaaagaaagaaaaaaaaaaaaaaggccaggcgcggtggctcacacctgtaatctcagcactctgggaggccaaggcgggcagatcacaaggttaggagatcgagaccatcctggctaacatggcaaaaccccgtctctactaaaaatacaaaaattagccgcacttggtggcatacgcctgtagtcccagctacttgggaggctgaggcaggaggatggcatgaacccgggaggcagagcttgcagtgagccgagatcatggcactgcactccaggctgggcaacagagcgagactctgccttaaaaaaaaaaaaaaaaaaatttacagaaagaaaaatatactatctgaaatttcagtggatggaattaacacactgctgaagaaaagatcagttaacttgagactacagcaataaaaactatctaaaataaagcacaaaaagattaaaaaaagagttaacagatcccagtaacctgtgagaaaatatcaagaggtctaatatatctgtaattggagtcccagaaaagacaggaagcggggacaagaagacagtatttgaagaaacaatgactaaaatgtttccaaattttgtgacaattatcttatacccccacagaagcaaaaactctaagaagataaacacaaggtaagctagaaccagaaatataatcaaattcaatgaaaattagtaaaaaaaactaaaattagacagtaaactggagtttgagagaaatatgctaaagaatctaaattttaacataatgaaaaagagtaattgtagggcacagttttagatacatttaatgaaagctagattaaggatcagctggctgagctgttgctgtgggcaatgatctctaaagggcactaaaataagattggaaatgcaacaaaaatggagaaaatatttactactcctcttcaatgggacagataactatatggtggaagaaacagtttgataaggcacctggggttcaaaataagttcacccccatcactacccattgcaaatgactcctaagttgcatctcaagagggtagatccaattaactgcagaggttttgttcacggagtgagttactcaagtttaagccactcagataaaactagatcaaaaagaagaaaaggtaggtactactacctaatacttttctttctctacatttatctttttttctaataaatattgaatgtacatttaaagaacaacattttgaagaagaattaaattaccagtttgcctgaaacaccattatcttagtgcatactcttagtgtccaagtatggcacgagtagccacagggatctcaatgctattttaattaatctattcaatttgacaattatcccatgtataataatatcagttactttacaagctacgaatgtgtttgggaggagcatactttaaaataccaaagagtacttaagtttttttacccatcgtcctttatctccttgaagtttactgaagaaaagctttagctcgcgaactgtcaaattatagctagccagcactcccaacatgtcaaccaaaagatctggaaacaaaagaaaacgataaaataactcagctagttatatttctcgaatatttaaaataaactgtgcttatttaagggcttggacactaaagttctaggtgcatgctacatgctcaaatatttcttaaatattgctaaatggaataagaaaaatatgtatttgaaaatcaaactttatttctttgcatatattgtactatagaaaaaatcatacctgctatcatattgtcaactttttcaattttcccaagcactttttcaacaaggcctacttcagtgcagacttgaagattccgtatgcttttcttcagaatggctgtaaacatgctccagacttctgcttggcacgtaatgtcacatttttccagtaggtccaccatgcagttaatactctcaccttcttggataatgaaattcatttccagatcaaactgtcctcctaccaacttacaaggaaaaaaaaaaaacacattaaaagcattagtatcctcaatatcactatagcatgttcctaaacattagattaacaataactactcacattcttcctccacatcaaaaggttcattaaaaaacatgcagctcaaaaaactgaagtttctgaagtaatctccaaatttagacagcaaagtaagagaatataaaaattaaaatatttttcaacaaaaacaaatataggatgtcttaggtaaattgctatctactaacctgttaccaataaagatctaaatcaactctacaattgcttctcatccagtctttcatttatgaagtatcaaatctgtgaactacactgaataatctaaaggtcctttgttacccaaacaacttatgagctcacggtaaaactgaaaagctgaaaaaggctcagagtggtcacacattggagtttatattagtcaaatttttggtttattaagcctattcattttacctctcctctgtagataatcagtataacttacatataattagtcacatatccaaagtcagtaaccaagaaaatgtatttcactgatattactatcagaacgctatagctatacaggccttgtcatctcacccagagcctccccatacagagggaaggttcgtaaattttaaataaatcgtaattgtgtaaaggaattaaaatacttttagaattacctttgtagagctatctcatttaactagattttttaaataaatttttttaaatttaaatttttttaatttaaaaatacatatatttaaggtatacaataatgctatcaactagattttttaaagatctctgtcagaaatagctacacacatgattcacctacgcttctttctgaatacttcttgatttttcattatgcatttccaaactgcatacccaaaaggtatgcaataattagaagaaagtgaactttaaaaaacaaatccggcagggcgtggtggctcatgcctgtaatcccagcactttgggagaccgaggcaggcggaccacctgaggtcaggagttcaagaccagcctggccaacacggtgaaaccccatctctactaaaaatacaaaaattagctgggcgtggtggcatgcgcctgtaatcccagctactcaggaggttgaggtaggagaatcacttgaacctgagtggcagagattgcagtgagctgagattgtgccactgcactgtagcctgggcaactgagcgagactccgtctcaaaaaaaaaaaacaaaaaaatacaaaaacttagccaggcatggtggcatgtgcctgtagtcccagttacttgggaggctgaggcaggagaatcacttaaacctgggaggcagaggttgcaatgagtcaagatcatgccattgagctccagcctaggcaacagaccaagactccatctcaaaaaaaaataaaaataaaaataaatccaatggctcttataaagaataacagacatgaccaagtggagtttagtccaggaaagcaaggaaggttcaaaactaggaaataaattaaaattccattcagcaggatcaacaacatgtatcccaggttctgacaaaaatatacacaggcatgagactgaaaaaaatggaaatgaacaatgtgaggatctgtacctgcatgcagagagacaagaactcctggcaagcacagtgataaagacatttcatctttctcagaaagctctggtagagatctcagcatacaatgctttgtatcatcactaccaagcagtgttaggagatgacagctgggattttgctaaaacagtctctccttgtgatggagtcaattctcctagttacatggccgtagctaaaaagtatacgtgcttggttccctagtcctcctggataaacgctataagctatctattatactatgaaatattccattctacttgaactggttgaattagattatattgtctgtaaatatgttgtttgtaaattttaaaaatacacaattcaaataagaactttaatatagctgttttggttttgtttgtattatttcctaatattgtctgtaactttttattttgaaataatttcgaacattcaaaaaaagtacagaattcctttatactcttcatccagcttccccaatgtatatatattacataatcatagtacagttatttaaaccaggaaattaacatttacaataccattaaccaatctacagatatcactcataaaaagatttaaaaaaaggcatgtatatgaataaggtgcttattattaataatgcttggctgacggtggtggttattgttattataagttttataattttataattacatatctatatttatatattattatatgataaaagtgacatgcaaatagaacaaagatcatttcatcaaaaggttagtggctgggcatggtggttcacacctataatcccaaaactttgggaggctaagacaggaggatcacttgaggcctggagtttgagaccagtctggcaacacagccagactctgtctccatattcaaaaaaaaaaaaaaaaaattacccaggtatggtggtgggtacatgcagccctagtactcaggaggctgaggtgggaagattgcttgagcccaggagttcaagactaaagtgagatcacaccactgcactccagcctgggtgacagtgcaagatcctgtctaaaaaaaaaataagtttagggatagctatattcaaatatctgggggaaaaaaaatcatcaatcaatccctcataccataaaaaaatttccaaatgagtctaagatttaaatgtaaaactgaagtcataaaatgagtctaaaataaaacttataaaagcactaaatgggttaggcgtggtggctcatgcctgtaatcccagcacttctgggagaccaaggcgggagagtcatgtgagtgcaggacttcaaggctacagtgagctatgatcatgccactgagccctagcctgggtgacagagcaggacatgtctctaaaaataaaaattaattaaataaaagcactgaatgaaatgatacaaaaaacattttatcacttcaagtggtaaaagcttttctaactaagagtttttaagatttctggacttcatattgacatatttaactacataataatcagaaactctatatgcaaaaaaaaatcaaaaagtaaattaaacacttagaaaaatcatttgcaacccatatcattacataagcacaaatagcttcctgaaaaaaaatttttaaaagaaaatatatctgcttgtgggaactagggtgttaaaaaaaaaaaaaagaaaatttaggcaaaggcaatgaacaaaaaggtaaataaaagtggcactaaaacatgaaacccaactttgcttacaaaatgaatattaaaaatacactaatataccatttttacatatttgattgacaaattccaaatctctaacaacatataaaaataatacatagtatgtgcaagaacatgaggaaacaggtactgtcatacattactgttgttgaggaaacaggtacaatatgacttattaagagcaatttggggctgggtacgttggcgcacacctgtaatcccgggactttgggaggccgaggcaggtggatcccttgagcgcaggagtttaagatgagccaaggcaacatagcaaaatcccatctctactaaaaatacaaaaattagccaggcgtggtggcagacacctttagccccatctacttgggaggctgagacacaagaatcacttgaacccacgaggcagaggttgcagttagccaagatcgcatcactgcactctagactgggtgacagagtgagaccttgtctcaaaacaaaaaaaagaaaaacaaaaaaatagcaatttggtaatatctatcaaaattttttatttttgaaacagcaatcaaactactagaaatgtatattatagacacatttatgtatctaacataatgatgttagatacaagaacttcattgtattgactctttttaaattacaagataaaggttaatgacagcctggcatgatggatcactcctgtaatcccagcactctgggaggccaaggtgggtggatcacttgaggtcaggagttcaagaccagcctggtcaacatggtgaaaccccgtctctactaaaaatacaaaaattagccaggcatggtgacacgtgcctgtaatcccaactacttgggaggctgaggcacaagaattgcttgatcccaggaagcggaggttgcagtgagtcacctgggcaacagagcaagactctgtctcaaaaaaaaaaaaaaaaagttaatgaagttgtatacaactatacaatgaaatatgatgtacatatagaaaagaatgaggccactccacatgatatgaaaagatctctaagatactgtgagaaaatcaaggtggagaaaagtgtgaacagtaggctacaatttgagtgtaaatcatttacacatagacctatgcatgtgctaaatatgtctaagaatgaactaaatatcgattgtctctggaaaagatctattgcatagaaggcaaaaaaaagattttagtacatacacttttgaacaatttgaattttgtgccatgaacacatattacttatttcaaaaaaaacaatttaaaaagaagcaaatgcagccaggtagggtggcttatgcctgtaatcccagcactttgggaaaccgagagagcagatcagttgcactcagagagttcaagaccagcctggggtcttgaaccaacatggcgagaccccatctctaccaaaaataaaacaaaaaattagctgggtgtggtggcatgtggctgtagtcccagctgcttggaggctgaggtgggagaatggcttgagtccgaaaggcagaggttgcagcagcccaagattgtgccactgcactccagcctgggcgacagggcaagaccctgtctcaaaaaaaaaaaagcaaatgcacaaaacaccactgatgtgaactgtagagcttatgaaatcatcataaatacaaatggtattaatacaaacgtttgggatttctcaagtaacctatttctaacaaattactcactgagtcaaaaataattcagcacaatataacaatgacattgcagaggcattattcaaatatttaacaactggcacagtgcaggcaccatgcaatcagaacacatacaaaacctatcaagatgggctcaagctgtaaaaatctcatacttacatattgaggcacattggctagctattggccttcatagaacatacttaagtaaaaaataacagatacaacacatctgcagaaaacaatcacaaaatacaaacctctactatataataaatttataaactcattcaacacacttttactgaatgcctacagtatgccaggccctgaggaaatagtggaacagtgatcaataagacagaaatagcctacccgtatttgcaggaacactgtgtcttatatcctacagaaatcttttttaattgcttatttagaaaatggctgggtgcggtggctcacatctgtaatcccagcactttgggaggcaaaggtgggtggatcacctgaggtcagtagttccgagaccagtgtggccaacatggtgaaaccccagctccgttaaaaatacaaaaattaggccgggcacagtggctcacgcctgtaatcccagcactttgggaggccgaggcgggcaaattacctgaggtcaggagtttgagatcagcctgggcaacacggcgaaaccccgtctctactaaaaatacaaaattagccgggcatggtgacacatgcctgtaatcccagctactcgggaagctgaggcaggagaatcgcttgaacctgggaggtggaggatgcggtgagccgagatcgcgccattgcactctagcctgggcaacaagagtaaatctccatctcagaaaaaaaaaaaaaaaattagccaggtgtggtggtgcatgtctgtggttccagctactcaggaggttgaggcaggagaatcgcttgaacccaggaggtggaagctgcagtgagccgagattgccccattgcactccagcctggtcaacaaagcaaaactccgtctcacgaaaaaaaaaaaaaagaagaaaagaaaatactagacttctggtttccaaactggaaatctctttctccatgaaaatatataatataggaatgacaccaagtagtaacttcagctcaaaatgtcattttgtataaatataaaatatataacattcataagttttcctaaatacctataatatctaacagaaaatacaagagttttaaaacaacatttctgataccaactataagtataaagtatctaggagtgtattaaaacatacacaagacttgaaagtaaagaaatttttttccacttttgataaatgaacagacctgtttctggatgggaatattaaatcagttcaagttgttaacttttcacaaattaatctataaattcagcacattaccattaaaattccaatatgatttttttctgaaacttatagtgattctaatttctatctgggaattaaatatatgaaaaaagtgaagggaaattctatacaaaaagaatactagaatcattaaacaaatggtataacataattattaaaactgtatggtactagacagaaaataatctaattaaaataaaaggttggtacaaataacttcaatataggattagagtgtcatcacaagcattaaatggagctatgaaattttcattttaaaaaattaagactgaatccttatcttacaaaatatgccaaaataaattctagataacttaaaatatcaaaagttaaattagaagccacaaatataagaaattctcaaagagtacaaaactcattaagctgtagaaataaaaagtggtacagaaataaagtattttcaatttggtgaaaaaaatgtttaggaagacatgaacagtcaattcacaaaaaaaaaatccaaatgacacttgcaaaaaaaaaatactaaatgaatttaactttgtttgaaattattaatgctcaaagtaggtgagaacaagattaaacagatactttcatacactcctgttgaaatatttccagaaagcaatatggtaatactaactaaacatataattgtgttaagtcaagacaatcttttattaaatgtgaggaataacaatcagcagcagatgccaatgattaagaaaaattaagaggaaaaattcaaaactgagaaaattaattccatgaacttcaacctgtaaatttggtaaagataatttttaatcaattttagcagtagaaaggtctggtccaggtccaagaacaccagtattctcaggaagataatttaaaagaatccacacagaagaatgtaaaattaaggagtgacagaatcttcagacacaagaaaaccttcttgtggaaaagaattgcagtgattcagaaaagtagcagaaaaaaacaaaaatctctaaggccatacaaaactagtaattccataattatataatgattataacttcaaaataactttttagtgaaaggaaagctcaaagagaaaatattttatgaaaatcatctagatacaacaataaaaaagacaaactcttcaacagtattttctagaagacagaaactaaaccttgtccactgaatacaataaagtacttcttacaacacccacatacaattgtacatcatttcatataagggaaaccaaccaataaatctgaaacaatttactgccaagaagataatgtctggagagagttttaatagtgtgaaattttcttctaacaattacatatcctccatgcgatctaaattggtcaaaaacctcgttacaactaacataagagaccttaccttcatcttaatattacttacatcaatcattcctataagtaaccaccctttcaagaagctatagatttttgaaagtaatttccaaaaaaagccccaaatatttcaccagcttttaaactgagattataatggtgagagcaatatccagacaggtgttttaaatattcctccattgctttaaatactataaaatatgcctttcaaggagaaattgatggcagaaatttgtacatacaaatgtgtggcatatttgatatactatatgtatgcatatctattatacctaaaaaacatgcacagggtctacagtatgtcatgttaaccctttctaatagttatttgaagctgatcaaccttcaaaacacaaatttgtttccaatgacagggatcataatccaggtacaggcattggctagttattatctgagctgtagtaatggctctgcactacaaaatgtaatcttcccaaatgtcacagtaagttatgaatatctgagcagcctaatgcactttactagccatgaaatgtgaaaatgtaatcttattaccttttttatggttgtatttttttgaataatgtagcatggaaactgatgtatagtctttttctacattttagcatgatttggtctcctttgctatatagaacatttttcaaaactctccatttcaacatattttagtcttggcctgaacttcataaacaatttttatagcagccttcagggtggcataacatgctttctataggttatactttaatgcataaggttatagaaattttaaagcaacttattcgaagaattcaaataaacctttataagttttgtatgaggactttaattgagcatgattatttttcttctcaatagtgatactaataaaatactttaagctgacattagtcactaatctaaattacctgtatattcggaaaatctaaagaccaaacatggagatcaaaaataattatcttctcttcaaaagattaatacaactggaatactgtgtgactcacagaaaattcaaatacttcaaagtaaagctctgttctccctggacaactcactggaaacttgctaaatttttcctcaaaggtggggcaggagtatggtatagtttaaaaaaaaaaaaaaaaaggacagggtgtaatcacagcttctgaccctaactagatactttcttgtgacctatctattatgacaggtgtagttaacacctgtctaaaaatgtcaaaattgcttttttctctgaacctatttatttataaaattaactaagagtaagcttcttttatttatctgcatccttcagaaacatattcaggttttaaaagtgtcaacctcaagatatccaatttttctccaggaatcctttcctaagtgaatgttaccttgtatatgtttacagccactggaaacttactaataaggagaagttgagggaaaattacaaagctgtgacacagactgcactgactcccaggttatatttccttcttccataataataaagagtttctagtttggcacacagagcccaggaaaaagatctcactctccagcttttcttgaatgaaaagcattcctgatcagccatgtgaccaagttctgaccaacaggcagtaaatacgtgcaacctctaggtattattctttaaagaaagaaacctgacccctttttccagctacgctccttcctactgcttaagatgcagaatagtggcaagagctacagtagccatcctggaattgaaggtgtcttatgttgaagataaaagagcaaatcgatctatggatcctggcaatcatagaactgccacactagcccgctacccagactttcacctgaaggacaaatacatttctgttttgcagaaaccactgttaatttgggcctctctgttctatcagttaaaagcctatattctgactaatatagatgctattcactgcattttctcagaaattaaaaaatatatattatctataactatctcaaatgatgtatccttattccccattcttataccatagcaggtgttagttcaccaaaagtgtcttttttgacctacttttgatagttggttatgtgccctggtaagttgagaaaccacagaacagcctattccctgactatattcttactggatagcttcatatatgctctacactactgtgccactatgacactttgccagatgccccattacaggttgaattgtgttctccaagaggacatatgttcaattcttaacctccagtgcttcaaaatgtgatcttatttggaaataggattgctacagatgtaattagttaagatgaggtcattagggtgggtcttaatccaatatgactgttacccttataaagagggaaaatttgtgctcgacacatgtacacagagaaaatatcatgtgaaaatgaagatagagattacagtgatacttctatatgccaaagaatgtcaaagattgccagcaaatcaccagaagtcaggaaagaaacatgaaacagattctcacaattctcagaaccaaccatgccaacacacttatcttagacttctagcccacagaactgagggaataaatttccattgtttcagcaacctaatttctagtactttattacacagccctaacaaactaatacatcccaacatctcccaaggtttatttttgatgttacccactaaattccccagtaagcattgtcaagaactcttagaaaagccaaaccacgacccagagactctgttcagcttatcttcacccagaccttcctacaacaccgtactctccttagagaaagaggtttgcggaatggatacacacagacatacagagtgaaataatagacactggagactccaaataatggaaaggaggtgagggtgaaatatcacctattgggtacaatgtgcactattcaggtgatgggtacactaacaggccagacttcaccataactcaatatatcaaggtaacacactgaacttatacccctaaatccataaaaataaaaacttcaatgtcaaaaaataggtttgtgattggtactcagtttttccaaaaagaacaatatattgctgaggaatatatacgtagataataaacttaaaaaaaaaaacaaacaaaggaatgactcacatcaaagttagcaaaagagctgggcatagtggcttatgcctgtaatctcagtactttgggaggctgaggcaggaggactgcttgagcccaggagttcaagaccaggctgggcaacatagcaagacctggtctcttaaaaaaaaaaaaaaatagcctggcaggtggcacatgccaatagtccaagctactcaggaagctgaggcaagaggactgcctgagcccaggagttcaaagctgcagtgagctatgatcatgccacagcaccccagtctgggtgacagggcaagatgctttctcaaaaaaacaaaacaaaacaaagttagaataaagataattgttttagcaaagaaaaagagattccaagtaaaaatattgttctattgttaacctggtattggatatatgcaggtacattttaatggtttttaagtacttttatatactttacacatatctttttaagtactttttaatacttttaagtacttttatatattttacacatacatttttaaaatacaacttattttgtatttgctatctccttgcctctctctgctatcttttggaaatttccccagtgtttcagttaccacattctttattcaattctttctaatctacttttcaatctgtctgttgagttaatttctatgtctttttatttaaaagttctatttgttgttatttttcaaatctgcttagtaatcttctctctttcctacataatcttttaagtgccttttttgttttccttctttttgttttctttctttcatgactttttgacatgaaagggcctctatttcataatttattataattttctaaattttatagtttgaaagtcttgaagatctaatcttgctttcagtgtatctactgactcctcatgctgtgctgcttttttaacgggtttttaaattttagattgtaaatttattttcaatggggctttatctgagagactctcgtgcagcctgtgcctctctaggttgaattaggtattctgctacctgccctagggatgtcttcagcatggaatgacttaaaaatatatatatatattttgagatggagtctcactctgctgcccaggctggagttcagcagcatcggcttactgcaacctccacctcctgggttcaagcgattctcctgcctcagcctcccgagtagctgggattacaggcgcccaccaacacgcccagctaatttttgtatttttagtagagacagggtttcaccattttggccaggctggtctcaaactcctgaccttgtgatccacccaccttggcctcccaaaatgctgggattacaggcgtgagccaccgcacctggccttaaaaaatattttttattgtgaaatgtttcactgcacccagctgccaagctattcttagacaaaatttaacattacagatatcgtggtaatacaatccagactttttttggaaatatcatattttctttcggaacaaacatttcttatatagtgtctggctacaatggctcatgtctgtaatcccagcactttgggaggcagaggcaggtggatcacctgaggtcagaagttcaagaccagcctggccaacatgggggaaccccgtctctaataaaaatacaaaaattagccaggtgtggtggcaggcacctgtaatcccagctacttcagaaactgaggcaggagaatcacttgagcctgggaggcggaggttgcagtgagcagaaatcaagccattgcactccagcctgggcaagactctgtctcaaaaaaaaaaaaaaaattcttagtaatatttgtctctactgggattctaaatctctgtaggtaaagacagtaaagtgtttttcttgcaggtaaagaaaattatgagttcgatactatataaaagaaaaagagtaagtttaatatgatttacagttaagtgtaaatgtagaatgtcactagaaacaaatataaattttcaacatatcccacccaaagaacttcacacaaatatgagtccaaaatatttcctaattatcaggtactagaaatcaaatctgctgttttaggacccaatttgaattctaaaatgttttcaccgaatacaacaatatgggttgggtagacaaaatttcagctcactctggttttcccctgtcccttctctaagatcataattgtaaaaaactatgtccatgtcccaggaatcacagaacatttagtctcgtataagaaatttctcatttcagaaaattaggttaaatttggtattctctacaattgcctttcctctttcttgcttcttttaaagaactataccttaacgttttcttaaggcccagctcaagaaatatctctctgagaaccattttgacctctccagccgacagtaaactagaatgatacacatcatattaccaatacaatatagtcatttaatatgctgaactgaaaatattccctttgaagtttttgttctccttctacttactatattctgggtctttcactatttcttagaatgcacagaagccctagcagtttcagcaatattatcaacaaactcacaatcatataagatttccatttctactatcataactaatccttacaagaaccctgtaagtcatacagattagtcaattatcacatctagctgataaaggaacaaaaaaaaaatgtgtccattcatagccaagactacaaatcagactatctgactcatagtctcatgtttccttacaccttcactaataatctattatttaagttagatttttttttctttaaatagtgagctaagtatttgaaaaatttgtgaactttactatctatacaaaaattagtcaaagtatatgttactgaaaataaattagaagtatcatctttatatttatttaaatccccaaacatactacaaaatagtcgaaatctcctctcattgtttattgtacccttcataagagttagaaattttcacagaataatggtatgtctacaaaagtgttaagaaaaaaggttccatgatcaaataagtctaagaaataatgaattaaacaatggtaaagagatgtttatatgatagaattaccagagctttaatatgcaactgtgcagtagacatcttgaaaggaagatatacaaccaatgcatggacttcccaaaagttatttcacaatggaacctcttttcctttttatttgatttagagatagggtctcactatgttggccaggctggacttgaacttctgtgctcaagcaatcctcctgcctcagcctcccaggtttctgtttgaacaagagattttttcataaatagcattcttcaacagctttttcaaaaaacatttgatgatgtaacatatttatgttcttgaagcttattattgtaagcttcacccagacccctaaatccataaaaataaaagtgcttgaagtcttagataggcagctggatgaataaatatcacagaattaactatgttttaagcaaacatttagtaggcacttcagaagtttttcaggtaagtagtttaactcaacctgtttgttttttcacagatttccttttatgacttattgaagttagtaagtaaacaaaaaagacatcttcaattaagattactttaggaaaaaagaaaatatgagcaaataaaatcacactaacccctcatccctttctgaaccagtcagtccaaaagtcaagcaacatagatatcctcccacatttggctggtctgtgtgcccacagaagtaatgtgtgacttacgaagttaggtcattagagcttcatggctccctttacatcattcattctaaggaaaatcagtcaccacaaatgaggatattcaagcagctcagtgagaggctcacttagagaggaacagtcctccagccagcagccagcaccaacttgccagtcatgtaagtaaccctgaaagcaagtcctctagtcccagttaagtctttagatgactacagctccagccaacattttgaatgcaacctcgtgacagaccctgagtcaaaactatctagccaacctactcccaaattcctgacccagaaaaactgagctgataaatgtttatcactgttttacactgtaaggtttgggggtaatttgtaacacagcaatacataactagtacagttacaaatcagtaattggggaaaactttattatgctatttattcctgtatcataaattttttaattcaaatattctaataataaaaatgcacagaataagtgattgctgtcagctacataggcactttacataagcactttacatggattatcatatttaattacctcttgtaaacatgaaacataagtaacttctgaacatgggtttcaacactacataatacttgtatttaattatttgtgacagttactgcagactggcttacccaacaccaattcctcaaagtctatcagacaaaactgaaaagaaagtataaatgagaaaaaaaaaatagttcatatggcaagaagacagttttggcaatgagaaaaatgaaacaaaaagatatagccaggctttaaaatcatactctatacctatgtattaagaagagaaaaagcagtgaaaaaaattcgagtggctaacagtttgtactctggcatgactctatacatctgaatactggtgatatggtttgtctgtgtctccacccaaatctcatcttgaattgcagctcccataatccctacatgtcgtgggaaggacccagtggtgggtaactgaatcatggggtggggggttctcatgatagtgaataagtctcacaagatctgatggttttataaagggcagttaccctgcacatgctctcttgcctgccgcatataagacgtgcctttgttcctccttcgccttccactacgactgtggggcctccccagcaatgtggaactgtgagtccattaaaactcactttctttataaattacccagtctcggttatttcttcacagcagtatgaaaatggactaatacaactggaaagttctttttttccatctcaaatatccaagtcagtctgaaatgtggaaggtatttagagttcaaggaaaaaaaggcagaatcaaataattcgagtacctatataaatatcttctataaaattacgtatagaaaataagatataaagatatctattgcagcactatttgtgaaactgaaacattagatatagcctaaatatccagcaatagagagatacttataaccagctgatggccatgtaatggaatattgtacagcctttaaaaagaatataaatcaatatgtgctggcatgccacgatgttcaagacacaatactaaatttttttaaaggtgcaggacagtatttacagtatgaccacatttccttaaaagatacaattatatttaaatcagagataagtgaaactgcagtttcagcctaggtagttgccaaaacatattgcttggtttcagctaagtgcccacttatgcactgcttctgacattcctaaagtgtaggtgataaataattgtattatcaagtatattaacatcatatataatcagtatgacaatgtcagtaatatagataaggcaagtcattcggatatagtatctgaatattcactttcaaatgcagacaaatttttgaggaaaaatctccttatgtgctttatatggtaaaagtgaggaattaaggcatatttctttttttttttttagatggagtctcgctttgttgcccaggctggagtacagtggcacaatctcagctcactgcaacctccgcctcccaggttcaagcgattctcctgcctcggcctcccaagtagctgggactacaggtgtacgccaccaagcatggctaatttttgtatttttagtagagacggggtttcaccgtgttagccaggatggtctcaaactcctgaccttgtgatccacccacctcagcctccctaagtgctgggattataggcgtgagccaccatgcccagccggcatatttcttattataagaataaaatgctacaatatttatttattatgaaataaacagtattatgaaagctactaattttatcttacaaaagtaactgtgccttcctcaataattggtagaaataaacagaaaatcagaaaggattaaaagaactcaataacactatcaacaaagaagaactaattgacatttatataagactccacccaattatagaacaataaatattgtttacaagggcctatggactagagattatattctgggacataatacaaactcaacaaatttaaagatattgaaagtatatggagtgggttctctgaccacaatgaaatcaaactaggaatcaataacagaaagataaagatcacagaaaaatgtgcgaacacttggaaactattacactcctaaatagtttatgtgtcaaaagaggaagtctcaaataaattttttaaatacgatgaactgaatcaaaataaaaatataatatatcaaaatttgtgggccatacctgagagggaaatttgtagcactaaaaccagaagtctcaaatcaataatctaagtttccattttaaagaacctagtagaaaagcaaaataagcccaaaacaagcagaaagaaggaaataataaagacaaaagcagaagtcagtgaagtagaaagtaggaaaacaataatcaatgaagagctagttctttgaaaagatcaataaaattgacaaaccttggcaggacttaaaaagcagcaagaaataagacacaaattactagtatcagggagaaaacactatcactacaggccttagaggcagcaaaaaaaaaaaaaatagggaatactgcaaacaactctaaacatataatgtgacaacttagaggaaatggaccaattcctcaaaactggaagctaccactacttgcccaatatgaaataatttgaataatcctataattattaaggaaattaagttcataattttaaaattcaaaaaagaaatctcaaagttcacatggtttctctggagaattcttctaaatattttttaaaaaattaatgccaattttaaatttctcaatccattttacgaagctactattttactaaaaccagacaaagacagtaccaaaaaaaaaaaaagcctatacaccaatatccctcatgaatataaacaccaaaattcttaacaaaaaattagcaagtagaattcggcaataaataagaattttacaccatggccaagtagattttattccaggaatgcaacactgttttaatatttaaaaatcaattaatgtaatccaccatattaataggataaggtaggacaatcacacgatcatatcaactgatgcagaaaaagtatttgacaaaaattcaataacactattgaggataaaaactcagaaaaatggaaacaaaaaaaaacttcaacttgataagcaacatttacataaaacctacgactaacattatactcaatgataaaagaccgagtattttctctcctaaagatcaggaacatggctaagacatgcactctcactacttttattcaaattagtgctgaaagttccagccatggcaattcagcaagaagaaataaaaggtatgcaggtgagaaaggaagaaattaagctgtccctatttgcaccaaagacatttccaaaaacagaaacctcctagaaataatgagttcagcaaggtaacgggttaccagataaacatttaaaaatcaattatacttccatatactaccaaggaacatgtgggcaatgacatttaaaatataccatctataattgctcaaaaatatgaagttcttagatgtaaatctaacaaaatatatacaggacttgaatgctgaaaacaataatatgatgatgaaagaaatcaaagaagatctaaataaatggagaggcacactgcattcatagtacagctgtcaattcctccaaaactgatatatagatctaacatagttcccatcaaaatcccagcaagacttttgcagatatagaaaagattattgtatgatttatatggaaaagcaaaggaactagaataccaaaaacaatcttgaaagagaaagataaagtagaaagaatccatctacccaatttcaaaacttattatgtagctacagcaatcaacactgtgaggaactggtggaggggcagacacataaatcaatgagacagaataaagaacccagaactagacccacacaaatattctgaacagttttaacaaaagtacaaaaagcaattcaagggagaaagaagagtctttaaaacaaatggtactggaacaattacaaatgaacttttctttacctaagtattacaccttacacaaaaactaactcaatattgatcacggatttaaatgtaaaatataaaacttttttaaaaacataggagaaaatcttcagaatttagggttaagcaagaagtttttagacttgacacaaaagcaagatccatacagggaaaactgataaattaggctttattaaaattaaaaattctgctcaccaaaaaaccttttcaggaggatgaaatggcaagctacaaactaggagaaaatatctgcaaaccaaatatctgacaaaagaataatatctaaaaaatatagtctctcaaaagtcaagagtaaaaaaaatccaattagaaaatgtgcagaagaacgtttcaccaaagaagacataaagaagacacataaacacacacacacaaaaagtctaacatcattaggcattaaagaaatgcaaattaagaccacagtggatatcactatacatcaatcaaaacaactaaaaaaataatgacaacaccaaatgctggtgaggatgtggagaaactggataattcgtatgttgttggtgggaatgtaaaatgacacagccactatgaaaaagtttggtaatttctatttaaaaaaaaaaaactaaatatgcacctactattcaatctagcaagtgcactcctgccatttttcccaaataaataaaaacttatgttcacacaaaaacctgtatataaatatttacagtagttttgttggtaatagccaaaaagtggaaatcactcggatgtccttcaacagctaaatggttaaacaaactgtagtacatccataccataaaatactattcaacaataaaaaggaacaaactattgacacacacagcaatctagaagaatctccagagaaccaattggtttttttctcaagttcgtacagtcttctggagattcttcaactgacaaaaatatagaaattgagaacagattggtggttgccaggggttaagatggggtagaggaaagtgggtatagctgtaagagggtaacaggaggaaactttctgcacctcgattataccaatatcaatattgttctagttttgcaagattttcccattgggggaaaccggataaagagtacaaaggatttctctgcattatgtcttcaactgcatgtgaatcagcaattatctcaaaatagaagacctagttttaaaaaataagtaattctatgtgaggtataaattgtcacaggattaattttccaccaattatttcccattgaaaagaaaactatattaacctaaatgaatcttcaattggtagaaaaatgagagccaaattaagcggcaaggaaactcgtaagttcaaattctgaagccacctacagacatacataatcccagcttctttacttatccctccctccctactccagccaaaaaaaaatcagtatatttaattacttgccctacacctgaaaaaatgtttgccatatactatacaaaaaagatgaagcatatattgatatcacacagagtttaactatatatcctactgactcacatctaatacttgcattatagaataaatatgcaaatttgaaccttcaaacaggaaatgaaattttctaaatccattacataacttcagattcatgtgtgcactgaaggctaataaatcatctaaaccttcatacagagaacctttttaaatttgcatttatctacagtaaattctgtcatgttctttaatagcttgctggttcaatctagcaaactagtgatttatagcagtgacatatttcaaaaatcagaaatctctcactatgtgacaaccagtcaaagtccactgaacttacattacttgaactcaaacatcataggatatgaaagagatagcaaaatgtcatgaatttcatattcaaatcaatttgagtttatgtttataagtgtttaaaactatagcatcacatacattacttaatacttcagtaccccaaatattttatgtcatgattccctcaatgtgtccaaactacctgtattttaaaatacatttttaaatttgatagttcataatttgaagactctacaaatcttactttgaagaacaccaaaatttagggtacatgaaagaaagatctatatattaggttttctccaccaaaaaaaaaaaatgtacttttagatctttataataatttcataccaatatccttatgtagggagatttatcagatgtgaaaatggagattatattaacaatagggaaataaactggaaattaccaaaatgttcactgtaatagacaatgttgtttttgtctgtattgtatttactcttccttccatcctcttccatttatggaattctgacaagaaagtctcagtacctcacacccaggtcacagagaggtcacttaagtcaggcctggctaaatatatacttcccccttctactggccacagtgattaatacaagactgagaatgtgagctaagtcaggccaatcaaaatcattaccaagactgttttttaatttataaggtgaaaaagaagggctcttggtctttgggtcaaaagtaggagaaatatgtaaactgaaggcttccagcagatatgttccctgccatgtggacagaggaggcctagctgcaccataaatggaagaagaatattctggtgacatcaattccctgtttccagggtttccctggttcttgcagcttcattcaatgatgtagcctggtcctatgaaccaatcattcccttttatacttaagctactttgatgtaagattctatctcttacaatgagaaaatcccggattaattccaaaaaaagaaggaactagctgaattatggcacatacgtatagttgtatataacacagcaattttttaaatcattttcattcatagttctccactgacagtctacgttagactcaacatcatctttttacaaaaaaaaaaaaaattctttgtgacacccctatactaacctgaaataaaagtgacacattccattttatcaattattttaaaaagatcagagatcagaatgtgtcttataatcaatggcatctaaaattacaattgcagggttttttcctaatgctgcataaaaataatgacaaatcttacaacttggcatcttagacttgaggaaacacaatagataataagacctacctataaacaacaacaaaaatctacaaagtactctaaccataataaaagaaaaataattaaaatacttttcagtattttttccatatataaatccttgtaaataaccaaataataaagtagttaggtcctggtaactatatacagaatctacattaatgtatgttacagaaacaaggcacagtgattcaggtgtgtattagatattcaaatactattatattccaattagacgtgatttttaattcttcataaagttccaaataaaacaaagtatgatttttttcttctttaaagcttacttatgtttctaaaaaaactcagcatatgttaaaagtattcaaaaagtttatgctgatatggaaaatgaaattaaagtctaataagttcaggagaacagaggatatcacaccttgctgtttgcaaatgtatcttccattgcaaggtccttagcagccttagtccagaacactaagtgtccactaccaactccaaatcattctaagaaccaaaaatactcaccaaatttcctaaacacctccaaggagcagtactggtctcactgagaactactcatgattggacaaggaaagatgtttaagatacatgattaaaggaaaaaaagcagatatgtacaaaataacctgttgtatatgtgtgtgtgtgtgtgtgtgtatgtctatagagagagagataggtagagacaaatgaagacagatgctgatacatataaaaatgtgtaggatgtatatgggtgtgtgtgctgcaagaagggcagacaataaactattaacaatggctacctcaaagaagtgggttgaggagagggaaattagacagtcagtctttcattttcacttcatacttttttaaatgagcatatactgctttaaacaataaaaaaaaggactttaaaaaatccaagtagtaaaggccatgtccaacatcattcccaagagcctgtctctttgcctgtgtctgtcaatgtctgcctgagcctcatcctgaccgtctataaggccgtctgtttctctctctctttctctctgtgcgtggggtgggcggggtggagagggtttctgtacctatctctctctggttcttggtatctgcatatctcttctttgagtgtgtctctcttgaaattatgtgtatctgtgctttactctctgagtatctgtctctctgtgtatgcatgaatgtcttcctcccggagcacagacggaagcatgggccttgacctcctcccagtcttaatgcattcatctttatatctctgtgtatgtgtccatcttccactttctcacttacaattattttgcttcctttcctcttctgtttccctgacccctcatctccctccatcaagcccttcgcccatcttgtcttcctctactacctccccaactgtttccatataagcaaagttcacactgctagagtgttaatgtgttcatagccctgataaactctcttcaactggatcacaaatgatcatttctatctgaagagcgtatctgaagagttctgttagttacaaaataacatgctaactaaattaaaattagggtaactaatccttattttaataatagaacaactcagcagaagatcaacatgaaaaacagaagaggtgaacaacactataaaccaactaacctcacgaacatctataggatatttattctccaggatagaccatgttactcatccataaaacaaatctcaataaatttaaaagaatagctccctctccctctctccctccccctccccctcccccccctctttgcacggtctccctctgatgccgagccaaggctggactgtactgccgccatctcggctcactgcaacctccctgcctgattctcctgcctcagcctgggagtgcctgggattgcaggtgcgcaccgccacacctgactggttttcgtattttttggtggagacagggtttcgccgtgttggctgggctggtctccagctcctaccgcgagtgatctgccagcccgggcctcccgaggtgccgggattgcagacagagtctcactcactgagtgctcaatgttgcccaggctggagtgcagtggtgtgatctcggctcactacaacctccacctcccagccgcctgccttggcctcccaaagtgccaagattgcagcctctgcccggccgccaccccgtctaggaagtgagaagcgtctctgcccggccgcccatcatctgggatgtgaggagcccctctgcctggctgcccagtctgggaagtgaggagcgcctcttcccggccgtcatcccgtctaggaagtgaggagcatctctgcccggccacccatcttctgggatgtggggagcgcctctgccccgccaccccgtctgggaggtaaggagcgtctctgaccggccaccccgtctgagaagtgaggagcctctccgcccggcagccaccccgtctgggaagtgagaagcccctccacccagcagccgccccgtctgggaagtgaggagcatctctgcccggcagccgccccgtcggggaggtggggggcagcccccgcccggccagccgccccgtccagaaggtggggggcccctctgcccggccaccccgtctgggaagtgaggagcccctctgcccggccgccaccccgtctgggaggtgtacccaacagctcattgagaacgggccatgatgacgatggcggttttgtcaaatagaaaagggggaaatgtggggaaaagaaagagggatcagattgttactgtgtctgtatagaaagaagtagacataggagactccattttgttctgtactaggaaaaattcttctgccttgggatgctgttaatctataaccttacccccaaccccgtgctctctgaaacatgtgctgtgtccactaagggttaaatggattaagggcggtgcaagatgtgctttgttaaacagatgcttgaaggcagcatactcgttaagagtcatcaccactccctaatctcaagtacccagggacacaaacactgcagaaggcggcagggccctctgcctaggaaaaccagagacctttgttcacatgtttatctgctgaccttccctccactattgtcctatgaccctgccaaatcctcctctctgagaaacacccaagaatgatcaataaatactaaaaaattttttaaaaattaaaaaaaaaagaacctagactcagaaatcaaaaaaaaaaaaaaaaaaaaagaataaaaggaacaccaagtatatcatttgaccataagggaataaaactagaaatcataacagaaagaaattttggaaactcaacaaatatatggaaattaaacaacacactcctaaatagcctatataaaagaataagtgaagaaaaaaaattaggctaggcacagtggctcacacctgtaatcccagcacttcaggaggccaaggcaggtgcatcacttgagcccagagttcgagaatggcctgagaaacatggtgaaaccctgtctctacaaaaaacagaaaaatgagccaggtgtggtggcacatgcctgtagtcccagtgtctcaggacacctgtgaggatcacctgagcctgagaggtagaatctgcagtgagccaccatcacaccactgcactccagcctgactgaaagagtgacacactatctcataaaagaaaaaggaaaggaaaaaaagaaaatagaaaatacactgagatgaatgaaaatgaagatacaacatgacaaaatgtatggaatgtataaagcagtgttcagagggaatttatagctgtaaatgcctactttaaaatagaagaaagatactaaatcaacaatataacctttgaacatgcataaaaagaaggagccaagccatgtccggtggcacccacctgtggtctagctactcaggaggctgacgcaggaagattgcttgagcccaggagttcgaggtcagcctgggcaacacaaggcaaacccccatctcaataataataataatgacgtaggccgggcgccgtggctcacacctgtaatcccagcactttgaaaggccaaggcatgcagatctcctgaggtcaggagttcaagaccagcctggccaacatggtgaaaccccatctctactaaaaatacaaaaattacccaggtggggtggtgggcgcctgtaatcccagctacttgggaggctgagacaggagaatcacttgaacccgggaggcagaggttgtggtgagccgagattgtgccactgcactccagcctgggcaacagagagagactccatctcaaaaataataataataatgtagccttccatcttaaaccctacaaaagaagcgcatagtaaacctaaagcaagcaaaaggaataaaataataaagattacagaagaaatgaatgaaacaaatgagaataaaatgaaattaacaatataaaattagtggtatttttaaaaataaaatcaatacaacctggcttctttggtccttcaacaacaacaacaaaaaaatgaaattgacagatttttagttagactaaccaagaagaaaagagaagactcaaattactaaaatcagaaatgagagtgcattactaccaaccttacataaatgagattataaagacacactatgaacaattgtatgccaataattagacaacttagataaaaggagcaaattcctcagagggatacaaactacagaaactgactcaaaaagaaatacaaaatacaaacagacctacaacaagaattaaattagtaataaaaaaatcaactcacaaaaaacaaaacaaaaaaaaaacttaggcccaggtggcttcactggtgaattctacctaacatttaaagacaaattaatacaattcttcacaaactcttccaaaacactgaggaggagagaacacatcccagctaaatctatgaggccggtactaaccttatgccaagatcagacaaaaccatcacaaaaaagaaaactacagaccaatatatcttatgaatatgaacacaaaaatcctcaacaaaatactagcaaaccaaatccaggaacatataaaaacagttatacactatgactaaatgagatttattccaggaatgcaagctcagtttaacattcaaaaattaataaatgtgatacaccataaaatgaaaaaccacatgatcatctcaatagacaaaaaaagcatctgacaaaatctaatacctttcattattaaaacacttaacagactaagaatagaaagaaacttcttcaacctgacaaagggcatctatgaaaatcccacagctaacatcatacttaatggaagtatcactatgaaccaattaggtattttatcttaaaatacatatacacacacatatacacatacacactcacacataaatatgtaatgtgtgtgagtgtgtgcgtgtgtgtgtatgtgtagttttatcaactggaaaggggtacaaacaatgaccaacacaataacaatgaacatgcttactgcccagattgtggtcttgaaataccatttctcactaaaaatcagggcttcttgaaggagtagcttgtattagtctgttctcacactgctaataaagacatacctgagactgggtaatttataaaggaaagaggtttaactgactcacagttccactccccagtggaactggggaggcctcacaatcatggctgaaggtgaaggtggagcaaagacatgtctttgcaggcaagtgagcatgtgcaggggaactcccctttataaaaccaccagatctcatgagacttattcactatcaagagaacagcacggaaagacctgcccccatgattcaattacctcccactgggtccctcccacaacatgtgggaattgtgggagctagaattcaagatgagattttggtggggacacagccaaaccatatcattctgcccacggcccctcccaaatctcatatcctcacatttcaaaaccaatcatgccttcccaacagtccccccagtcttaacccattttagcattaactccaaagtccacagtccaaagtctcatccaagacaaggcaagtcccttctgcctatgaatctgtaaaatcaaaagaagctagttactgcctggatacaatgggggtacaggcattgggtaaatacactcattccaaataggagaaattggccaaaacaaaggggctacaggtcccgtgcaagtccaaagccagtgggacagtcaaatcttaaagctccaaaatgatctcctttgacttcatgtctcacatccaggtcacactgatgcaagaggtgggttcccacggtcttgggcagctccgcccctgtggctttgcagggtacagacccactccttgctgctttcacggctggcgttgagcatctgcagcttttcgaggtgcacagtgcaagctgtcagtggatctaccattctggggtctggaagattgtggccctcttctcacagctccactaggcagtgccccagtggaaactctgtggaggcgcttgtaccccacatttcccttccacagtgtcttagcagaggttctctgtgagggctccacccctgcagcacacctctgcctggacatccaggtattttcatacatcctctgcaatctaggtggaggttcccaaacctcagttcttgacttctgtgcacccaaaggcccgacaccacacataggccatcaaggcttagggctttcaccctctgaagcaatggtgtgagctgtatattgcccccttttagccacagctgggatgcagggcacaatgtccccagactgcacaaagctgcaagtcccggaggccagcccacaaaaccactttttcctcccaggactccaggcctgtgatgggaggggcttctgtgaagacctctgacatgccctggagacatttccctattgtcttggcaattaacatttggctcctctttacttatgcaaatttctgcagctggcttgaatttctcctcagaaaatgggtttttcttttctattgcatcattaggctacaaattttccaaacttttacactttgcttcctcttgaatgctttagcacttagaaatttcttccaccagataccctaaataacctctctcaagttcaaaattccacagacctctagggcaagggtaaactgccgcaagtctctttgcatggcaagaatgatctttactccagttcccaacaagttcctcatctccatctgagatcacctcagcctggactttatcgtccatttcaccatcagcatcttggtcaaagccattcaacaagtctctaggaagtttcaaactttcccacatttccctatcttcttctaagccctccaaactgttccaacctcttcctgttacccacttccaaagtaacttccacattttcaggtatctttacagcagcaccccaccctaccattaccaatttactgtccgagtctgttctcacactgctaataaagacatacctgagactgggtaatttacaaaggcaagaggattaacggactcacagttctacatgcctggagaggcctcatagtcaaggctgaaggcaaaggaggagcaaagacacatcttacatggcagcagccaagagtgtgtgcaggggaactcccctttataaaaccatcagatctcgtgagacttatccactatcaagagaagagcaggggaaaaacccacccccatgattcaattacctcccactgggtccctcccacatgagacctacaattcaagaaagattttggtggggacacagccaagccattatgatagctggttcaaggtctggaactagaaatgaaaatatgagcctgaaatatcttgccataaaaatagcagaaacatgatcaaagtctagtagggttgtaccaaaaggactcaggaatcaacctgaagaagtgcctactggccaaaaataaaagtttgaggttcaataaagtaataataattgccatcaaatatgtttaaatcctttaattcataatatttcaaaaagacaataacaacgaattggtctcctgtagaggataagaagagaaatggctgttacttacaaaattaatgaataaaaggaatgaaactgttccaattacatatttatataatatttatataatatgtaacatagtgtaaatctaatatacttattatattatctataattatatataaagaacatataaaaagtatataaatatataaaagaatgtaaatacacaaagaatatatttataaatctatataaagtatacataaatatataaagtgtgtgtgtgcatgtacgtatacatacttttttttttttttaagaaacagggtcttcccatgttgcccaagctggccttgaactactgtgttcaaggaatcctcctgccccagcctcccaactagctggggctaccggtgtgtaccaccatgcctggcttatctatgtattaactgtgccactggataactaaatacaactggataattaaatacatcttttcatagaactattccatttaatacatgaaaaaatatatataatatcatcattattcagactccagtgatttaatggatctagatgttgagaatcaacagctgataacattataaaaagagacaacctgacataagagcctccggatgacagaacacagcaccacctagagtctagccaaaggtatggaagccaaatcttctggaatcaacttccaatttgcaggaaatacggaggacacaagaacatgttaaactacaccatgaatatgcacttaacaaaatccagaccatgggaaatgctaaatgtcaaaaggtccaggttttttaaaaggtccaggtttttttaacagatagaatgacctgagacttaaaaaacgtgttttttaaaactaagaaaaactaaattatagataagggatgtattattagattacataattacaaataaataaaagaaagtgattactgtaaaagtcaagatagaggttccatttgagggagagaggcagttgtaattagagggattctaagatgactggcaaaattctatttcttgacctacatggtggtttaaaggtaattatttgccctttagttttatatttgttttggtttggtttttcaatagttacagttttacaataaaaatttttatgagaaagttctgtcaatggttaatttcatattttaaaacatctatattcaggcaatgcaattccatcataaaattagtagtttcagtttttgtaaacttgtaactcacagcctgtattaaatacatataacacatttctttcagtgactcctaagaagcttctgatgcataactaacctccatatgtaagtcacctcaaaacagtaacagtgctctcaagctgcctcagggaacatggcgccacctctctgctgagttatgtatagccactttggccgcccactgcatcctgatggtgatgggggagacaggctttgattgccagtcacacccctctatcctcaccccatattggctgtggctgtagatgagattcagctgtgggtggcctcagctcaccaaccactgccttggttttgagggtcaaacccaggctcaaacaggtgggggaggaggataaacagccatattcacaaatgcattcttgaatcactgaatctatgtgaaataattaaacaaaagagaatgtccttaaaaagaactcatatttgcaggcctaatcttcacccaagagatcttaaaatgctatcaccttatgcataagagctaaagagaaatactgcaaggcatcatgatatcctgagaaaacttaaagctaagacagaagaaacagagattagccagaaaaaaacaaagtctagaaaaatcaacattgatatatttcaaaagatttaacagctgcagaaaatgagtttcaaaaacaaaaaatactatttttaaaaataccagtcttattatttttattagaaaggttaggaggatagaagagaagcaagtagacaagctgactctaaatttctctaggaaaagtaagcaaacaggaatagccaggaagctgtgaaaaagaagtgcaacaatgggaagctagctccatcagagattaaaacataatatgaaataaaataacttttttaaaaagcggtagcagtagatgaatgtctgctagatgaagaagagaacagaaagtccacacatagtgccaaagacaacaggaaattatcacaccataataatagcaatttttagagcacttacttgtgccaggcactaagaatcttatgtatattaaatgtctgactactccatgagataggtacaattattgtatttttatttgaggaaactgaggcatagacatatgaagtaacttgcccaagatctcagaggcaagaagtggtgctgctagaatttcaacctaggtaatctagctacaaagtccacactcttaacctgtacgcactatggtttttctgtttttcattcaggtgacatctcaaatcatggaggaataataaacaattcaataaacagcattaaattggaattcaatttttttctacatatgttcaaatggacatttgtagaaaaaataaattggcccatatttcaaatcaggaaaaatttcaggccagacacagtggctcacacctgtaatcccaacactttgggaggctgagataggaggattgcttcagtccaggtgtgcaaaactggtctgggtaacatggggaaaccccatttctacaaaaaaatgcaaaattagctgggcatggtggtgctcacctatgatctcagctactcaggcagctgaggtggaaggatcacttgagcccgggaagtcccagctacagtaagctgtgatcacaccactgcaatccagcctgggtgacagagtgagatggataaataccagagtgataaataccatcaaaataatacaggaaagcatagaactttaaggaagttctgagtaagaaaagcctttctatgtatgattcaaaacccactaactataaaagaatagcacaataaattcaagctacataaaaataaaaagcttttggctgggcacagtggctcgtgcctgtaatcccagcactttgggaggctgaggtggacagatcacttgaggtcaggagttcgacaccagcctgaccaacatggtagaaccctgtctctactaaaaatataaaaattagccgggcgtggtggcatgtgcctataatcccagctacttgggaggctgaggcagaagaattgcttgaacccaggaagcagaggttgcagtgagccgatatcacaccactgcactccagcctgggtgacagagccagactctgtctgaaaaaaataataaataaaatttaaaagaaataaaaataaataaaataaaataaaaagctttttattaaaaaaaaaaacaccactagtcaagtcaaatcaatccctttaaaataagaagcttctagaaaataacaaaaacatcaactcaatataaaaaggggcaaagtaacatgttatttaacaatgaatttaatccctctccctctcactctgcctctccccctccccctcccctttgcacggtcctcgtctcccctttgcacggtctccctctgatgccgagccgaggctggactgtactgctgccatcttggctcactgcagcctccctgcctgattctcctgcctcagcctgccgagtgcctgggattgcaggcatgcgccaccacacctgactggttttcgtattttttggtggagacggggtttcgccctgttggccgggctggtctccagctcctgactgcgagtggtctgccggcctcggcctcctgaggtgccgggattgcagacagagtctcgttcactcagtgctcaatggtgcccaggctggagtgcagtggcgtgatctcgaatcgctacaacctccacctcccagccgcctgccttggcctcccaaagtgccgagattgcagcctctgcccggctgccaccccatataggaagtgaggagcgtctctgcctggccgcccatcgtctgggatgcgaggagcccctctgcctggccgcccagtccgggaagtgaggagtgcctcttcccggccgccaccccgtctaggaagtgaggagcatctctgcctggccgcccatcgtctgggatgtgaggagcccctccgcccggccccccagtctgggaagtgaggagcgcctcttcccggcagtcatcccgtctaggaagtgaggagcgtctctgcctggccgcccatcatctgggatgtggggagcgcctgtgccccgccgccccgtctgggatgtgaagagtgcctctgccctgccgcgaccccgtctgggaactgaggagtgtctctgccctgccgccaccccttctgggaggtgaggagcgtctctgaccggccgccccatctgagaagtgatgagcccctccgcccggcagcctccccgtccgggaagtgaggagcgtctccgcccggcagccgccccgtccaggaggtggggggcagcccccgcccggccagctgccccgtctgggaggtggggggcccctctgcccagccaccccatctgggaagtgagaagcccctctgcccggccgccaccctgtctgggagatgggggggcccctctgcccagcagccccgtctgggaagtgaggagcccctctgcccggccgccaccccgtctgggaggtgtacccaacagctcattgagaacgggccatgatgacgatggcggttttgtcgaatagaaaagggggaaatgtggggaaaagaaggagaggtcggattgttattgtgtctgtgtggaaagaagtagacataggagactccatttcattctgtactaggaaaaattcttctgccttgggatgctgttaatctataaccttacccccaaccccgtgctctctgaaacatgtgctgtgtccactaagggttaaatggattaagggcggtgcaagatgtgctttgttaaacagatgcttgaaggcagcatactcgttaagagtcatcaccactccctaatctcaagtacccagggacacaaacactgcagaaggcggcagggccctctgcctaggaaaaccagagacctttgttcacatgtttatctgctgaccttccctccactattgtcctatgaccctgccaaatccccctctctgagaaacacccaagaatgatcaataaatactaaaataaaaaaattaaaaaaaatgaatttaaaaatgagcaaaggatacaaatggataattcaaagaaaatatggtcaaccttagtcataagggaaatgtaaatttaaattctgattaatcatcactttttcacctattagactggcaaaaaccacagctgctaatactgttggagatgctacagaggcactttcatagagttctggagggagaataaattaatataatccctgggaaggcagtttggcaatataaaccaaaattataaaggaataaaacctttgacccagcaattatatctctaagaatctatcctatagatacaattacattaagtatgaaatagtatatgtaaagattatttattgaagtattattagtaataacaaaatactggaaacaacccagtaaacaggggtcaagacaaccatggttcatctatgcaatagaatacttatatagctcttttaaaaatacagaagctctgtataaaatgctttagaaagacaaataagaaaaattatcagcaaagaaaaagcaagatgtagaacaaggggtacagcatgccaccttctgtacaatgaacaagtgaaacatacaagtatttacattagtttataaaagcctaagaaaatttagaaggatacatgagctgctaataatacttttcaggttttctctctatcgtctatatatcaatcattcatccatctacctatctatttatttgagacagggtctcactctgttgtccaggtggcagactgcagtggcgtgaacacagctcactgtagccacaacctcctgggctcaagggatcctcccgcctcagcctcctaagtagctgggactataggcacatacgaccatgcccggctaatttttttttttttttttaatacagatggggtttcaccaagttgtccaggttggtctcaaactcctgggcttaaacagtccttccacctcggccttgcaaagtgttgatgttacaggtgtgagccactgggcctgacctaggttttcttaagcagtgactaaattaactgaaggagagagatgagcaagggataatgtatgctggaaacaaggagaaaagaggtcatagagagagatttcattaaatacattcctatttttgacctgtgttaaaatgtttcaaagtcatatatttgacagaccagaaacaataccatcccacaggtactggatgagataccccaaataatatgttaatatcaataaagatagtgttttgtacatgatccatcttcattttcgtttttgactatggtattatgtgaaattttgcccctggagaaagggaagtacatattggagactgcagtggaagatggtagaaaagaagtgaatcagcaacttatgaggcaaatgcattaaaagcaaaatacccaagtggtatatttgtagctcattctcttaagtgctacatcttactgcttgttttgtattgctagttcattcttttttttttttttgagacggagtctcgttctgtcacccaggctggagtgcagtggcatgatcttgacatactgcaagctctgcctcccaggttcaaagccattctcctgcctcagcctcccaggtagctgggactacaggtgcccgccaccacacccagctaattttttttttttttttttttttggtaatttttggtagagacggggtttcaccatgttagccaggatgatcttgatctcccaacctcgtgatccgcccgcttcggcctcccagagtgctgggattacaggcgtgagccaccgcgcccggccgctagttcattcttaattattcaaattaactaaaaggcaaatcaggatgctttctagataattttttgtattataaaaccaagaaggtaaacagtgctagtttaagcatttggctgagttaacagatttttcccaaacaagagcacactgcagcctgtatttctcaaaacatctattactattgcatgtcatccatcagcataaacaaatggaagttcaaaaaatagggctgaaacaagacagctttggtaagaattaatatttaaatgtcttcctcagtgtcgtgtcatcaggaatcccaggctgaggcccagagacaacctcatggccttgaaatctaaacaacatagaaacataagccttcactatctcttattagttatttgagatctactatttactccataaacttaaaatatcaagtaaacactggtttttaataaaagtctaatttaatttgttttaaatagtagttaaaaaaccattaacacattaaggacataaaaaaaattcctccttgaaaaataactccaatttaattcagaactctaatgatagcacattattaccaccacctcaagcttctcaagaccattttaactatgtaataacccctgaacaaaaatcatcatggcttctcatcacctacagaataaaattttaatcacttgggcaacaacgcaaaatgtcaaaaagtctcacttcccatgttgtccctatacaatccagtccagactatttattatatccagaaggagttttaatattctactcccttgcctttgctctccctccctaaaattcaaagtttagctctagccccacttctacaaaacgacatttccagataaaacttgtccattgcaaaatatgctcagttcatagatactgctttgaatttttagtctcccatccaagtacagacatacatcattttatggcacttcatgttattgttctttgcagatacagcattttttacaaattgaaggtttgtggcagccctgcatccagcaggtccattggcaccatttttccaacagcatgtgcttgctttgtgtttctgtgtcacattttggtaaatctcacaatatctccaactttttcattattattatatttgttatgatgatctggaatcagtgatctttgatgttactactgtaactgttctggggtatcataaaccatgtccatataagatagtgaacttaataaatgtggtatgtgttctatagctctaccaagagactattcccccatctctcttcctctttttgggccaccctattatctgagacataacattgaaattaggccaattaataaacctacaatggcctctaagtgttcaagtgaaaggaagatttgcacatcttttttttttttttttttttgagacagagtctcactctgtcgcccaggctggagagcagtggcgcgatttcggtttactgcaacctccacctcccaggttcaagcgattctcctgcctcagccgcccgagtagctgggattccaggcatctgccaccatgtctggctaatttttgtattttagtagggatggggtttcaccatgttggccaggctagtctcgaactcctgacctcaagtgatcacccacctcggccttccaaagtgctgggatcacaggcatgagccactgtgcccggccgcacatctctcattttaagtaaaaaactagaaatgattaagcacagaaaggcctacgtcaaaggttgaaataggccaaaagctaggcctcttgtgccaaaatccaagtgtgaatgcaaagggaaagttcttgaaggaaattaaacgtaagcaaaacagcttcatggctgatatggagaaagttttagtggtctggatagatcaaatcagtcacaacgttcccttaggccaaagcctaatccagtgcaaggccctaactctcttcaattttatgaagtctgggagaggtgagtaagctgtagaagaaaaagtggaagccagcagaggcttaaggaaagaaacagtctccataacacaaaatgcaagataaagcttcaggtactaatggagaaggtacagcaaattatccagaagatctacctgagataactgataaaggtggctacacaatagatttttaatgtagacaaaacagccttctattgcaagaagatgccatctaggactttcctagatacagatatgaaatcaatgcctggtttcaaagcttcatagaacaggcagactctactgttaggggctaatgcagctggtgactaagttgaaggcaatgctcacaaaccattctgaaaatcgtaagatccttcagaattatgttaaatgtactctgcctatgctctataaatggaacaacaaagcctggatgactgcatatctgttcacagcacagtgtactgaatattttaagccaactgttgagactcactgctcggaaaaaaagatttcctttcaaaatattattgaccatttacaatgcacctggtcacctaagagctctgatgcagatatacaaggagattcacgttgttttcgtgcctgttaacataacatccattttgcagcccatagttcaaaatgtaatttcaactttcaaatcttattatctaggaaatacattttgtaaggctatcactgccatagatagtgattcctctgatagagctgagcaaagtaaacagaaaaccttctgaaaatgattcaccattgtagatgccatgaggaacatttttgattcatgggaggaggagtttggaagaaatggattccagaccccatggatgactttgagaggttcaagacttccatggaggaagtcacagcacatgtggtggaaatagcaagagaactagattgagaagtggagcacccaggctggagtgcagtggtgcaatcacaactcactatagccttgacctcccagactcaggtaatcctcccacctcagccacccaggtagctaggactacagatgaacgccacaacacccagctaatttctttttatttttggtagagacaaggtctcaccatgttgcccaggctagtctcgaactcctgggctcaagttatccacccacctcagcctcccaaagtgctgagattacaggcgtgagccaccacacctggccaaagcggtttcttgagatggaaatctacaactggtgaagatgccatgagtattgttgagataacaaaggatttagaatcttacataaatttagttgataacgcagtagcagaatttgagaggactgactccaattctgaaagaagttctactgttcatagaacactactgaacagcattgcatgctacagagaaatttttcaagacaagaaaacaaagatcagtcaatggggcaaaacttcattgtggtctgattttaacaacttttcacagccactgagcaaccaccaccctgatcgaggcaaaaccctccaccaccaaaaagattaggacactctgaatgctcagatgatcgttagcatttttaagcaataaagcatttttttaatgaaggtgtgtgcattgtttttttagacataatggtattacacacttaacagactaaagtaggctgggtgtgatggctcacatctgtaatcccagcacttagggaggctgaggcagacagatcacttgagcccaggagtttaagaccagcctgggcaacttagggagaccccatctctacaaaaaagtaaaaacttagctgggcatggtggcctacacctgtagtcccagctacttgggaggttgaggtgggaggatcgcttaagcccaagaggttgaggctgcagtaagccttgatcacactactgcacttcagcctgggcagcaaagcaagaccctgtctcaaaaaaataataataatatatacttgtgtgtgtgtgtgtgtgtgtgtgtgtgtgtgtacacacacacacacacacacacacacacacaaaagtatactgtaaatgtaactcatatgcattggaaaaccaaaaaatgtgtgactcatattcactactttattgcagtgctctcaaacaaaatctgcaatatctccaaggtatgcctgtactaatcaggcctaactccgcttagcttcaaagatcagacaacactgggtgtgctcagggtggtataactgtgtctagagtattagttatctttatatgagtcttgtttccatcagactgtaagcttctgagaaggaaaactgcatttggtgagcacctactatgtgctgggcattattttcaaatattccaagagccctatgaaactggtactgttattctcattttaaagatacagaaactaggtcagaaagattacacagcttgaccaagatcataagcccaagaactgacagacctgagtcaaaccaaaagtctacctgattccatgcaagatactgcctctcaaaaagaaaagaaaaattcaaaacaaaactattagaaagctatacagtatatagaatatgtcgaagtgtgctcactcatttcatttttgttgcaacccttagaggcaatgtattagttatggttgctactacttttctctggcaagcataatttcacatttccctttctctggttcctttgaggaactttttccttacttcaaagtagtcctggcagggacatgaatcatggtgcccaatttcatacagagtggcacacaacaaagataaggcaatcagacacatactgtcacatataatgattgttttagctataaggtcatcatgtaagccagcccagtcaaaatccttcaggggtctaggcattttcattatgttattttgaataattctgcttctaaccttcatcccagccaccttctctttcctcaactcaacacaacagaaatttgataaaagttcaataattgcaaaaggaatatttggcataagggtgaaaatacacagatatacttggttcctcatgtcttaataaaatctatagtgaaataaagtcaaagaacaatgctttcagtacagagtacttagataacaaaatatcattctctttctaatcataagatatatttaatactaaattttatgtaacaaatagctataaacaaatgaaacattaagagctctgatttttatttactatttcacaagggttccaagcttggcccaaagaggaagggaaaaagaattcacatgctataaaaaacaggtatgcaatctgaagcttgtgttaaagaaagaaggtaaaaatggagatgcctttaatgtatcatcatttgaaaacttacagcaaattaatgtagtatattagccaacacacagattagggagaaaaaatgcataaatgtatgccagtataatgtacctccattccataactactgagaaaataattagaaatttacagcacaatatatttatagattctcttataagtaccttaccaaaaaaatcaatgctacaaaaatgaaactaatgagcaccatctcatgggcatttgaagtaatatatgtaaaaccagcctttgcaagagctttaaaaagccaagttacttagtaaaggattaatcataaaactttcttttaaaatttcaaattttgtacatatatcctaaaaagttaacaagggttttaaacaaacagatatactatttaagccagtatttaaatagcttcaacaaatataaggggaggagatgtaaaatgattctcacaaaacaaactctgtagaagagttaaatagaagcaaaatccaaaactgttaaaaaataaaataaaataaaatagtacttaacaagaaaaaacaggattttagatagatttggcaaatctgaaagtaacataaatcaactctttctcatagtgactaacagattttccattttaaaaaccctgacttgatcattatacattctacgcatgtaacaaaataccatatgtaccccataaatatgtaaaatattacatatcaatttttaaaagtcagaagaaatgcttaaaaaacgtatttcacatttcctctaatggtgtacatttaaaaggaaatgcatttcccattcaaagaaaaacatgtactactttaagactaaagcaatctttgtcagcttcctggctcttcatttaagtttattttctaaaggcaatcaagtggaatatattaactagactatctgatactaaacaaagcagttatttcctgcctgaaatttcatccagtagcaacatacactcactgaagcacttcagtgtcacattctctcttggttcagattacatgaactcactttctgtaaattaatagtcagatcaagtatcttcttacagtgttagaagaaatggcaaactttgagaacaaaaattgtcctttaaaaaaaaactatcaataattagtcttggccgggactggtgatgggcacctataatcctagcactttgggaagccaaggaaggaggatcacttgaggccaggagttcaagaccagcctgggcaacagaatgagaccctgtctctatttttaaaattaaatattttgtctgtctgtttgtttgtttgtttgtttgtttgtttgtttttggagacaaagttttgctcttgttgcccaggctggagtgcaatggcatgatctcagctcactgcaacctccgcctcctgggttcaagcaattctcctgcctccgcctcccgagtagctgggattacaggcatgcgccaccacgcccagctaattttgtatttttagtagagacggggtttctccatattggtcaggctggtctcaaactcccgacctcaggtgatctgcccgcctcagcctcccaaagtgctggtattacaggcgtgagctaccatgcttggcctaaaattaaaattttttaaatgatattaatcagtctagttatcaagtccaatcttgttctacattaatatttcaaaagaggcataatgtatagaatcaaatgtgtacaatatagagtaaaatcttctaataattctgttctaataactgtgtgattacatataagataaaaggatgtctaaataaaaacttgtgtggatttttgccagttaggctattgattctgtttaaagaaaccaactcatgaccagacatggtggcttgtgcctgtaaccccagcacttcacgaggctgaagcgagaagatcacttcagcccaggaattcaagaccagcctgggcaaaatagcgagaccctgtctccacaaaaagtaaaaagcaaaagaaacttgagcatcagcagtgcagtaaagtttaaaagagcacaacacaagaatgcatcactgcaaatgaatctatcaacacacattaatcaagcagctattacataaaagatcaaatataagacgcactcgctgattcacaaaaatattcatgttcagcaggcaaaataacaatgagtacggtatgcaaagtactgccactggctataaaagggtaatggacaccagatttaatctctcaccataaagtggaaaactaaacaaaatacataaaacaattctttggactgtgatcactgaaagcacaaaaacaaacaaggtctcaactcagtgacaccttgagacaatgaaaccattgagttgagacaaccatcattctaatgagttgaagagacacagatcagagttcagagagaatgagatggctggaattcaaggagaagagtaccagagaagaaggttacctgagaaattgctctagaaatcttagtagtggtccctttgagtatttggatgaatactaaactgcatgggcattgggtgagaatcagaacaccatcaagagaagaacaactaccgagattgttgtaagctgaaaaattctacaggtcacacagggctgagagaagtctgaattctattcaaagtggaaagatctcaaacatccaaggctttggactaagctttagttgtacaactaaacaaggactagaataaaggctacactatatctaccattgcaatatttaaaaacaagctttgagtctgccttgaaagaactgtatagcagataaatagaagcgctggctacagtgctgacagaaaccttgtctttcaagccagacaaactggaaaaaggcaggagagggtaggaaagtcatggagagaagaaaagttctctatgaaccaatacaagactcatccctgtgcaaagcatatgacagacccaaaccagaaaagtaaaagctttgagaatcgaactcaaatctcagactagcccctgagtggcatatacacaggacaaacccaaaaaaaaagcaaggcaaagcttttgaaaactgaactgatattgaaaccactacatatagaaagcaggccaaaacttgtggtctgaccctaataaaggttgattgcctgctaaacaaacaaaataaatcagccttctccaagaaatataacacagctcagagtctaccaacataactttcacaaaatcaggaatacaatccagaaattacttggcatacaaaaaatcaaaaaactatgaatttcaagagaaacaacaataaacagataaaaacaaatctctactaatcagatgttggaattaccatggaaagagtttaaagcagctattaatattataactatgcttcaggaggtaaagataaaggtaaagtagccaggcacagtggctcacgcctgtaatcccaacattttgagaagccaaggcgggtgggatcacttgaggccaagagttagagaccagcctggccaacgtggtgaaaccccatcttaaaaatacaaaaattagctgggtgtggtggtgcatgcctgtaattccagctactcaggaggctgaggcaggagaatcccttgaacccgggagacggaggttgcagtgagcccagatcgcaccactgcacttcagcctaagtgacagagtgagactgtgagactctatctcaaaaaaaaaaaaaagaaagaaagaaaacaaaaaagaaaaggtaaagaaaaatgaaatgaatggaaagacagaatagaagtattcaatggagaaaactgagaagtaaaaaatctattaagaaattatttaagaagtaaaaacctattaagcctagatgggcacattagcagaatggagatgacagaaaaaataatcaatgaatataaaaataaatcaatataaattatttaacctgaaaaacaaagaaagaggtaagattgaaaaaaatgaataatctaatggaaatatgggacagtatccaaaagtctaacatacatgtcactggagttccaaaaaggagagtagaggccgggcgcagtggctcacgcctgtaatcccaacactttgggaggccaaggtgggcagatcacttgatgtaaggagtttgagaccagcctggccaacatagtgaaaccccatctctattaaaaattaaaaaaataaaataaaaacttagctgggcgtggcagcacacacctgtaatcccagctactcagaaggctgaggcaggagaatcgtctgaacctgggaggcagaggttgcagtgagccaagattgtgccactgcactccagcttgggtgacagagtgaaactccgtcttgaaaaaaaaaaaaaaaaaaagaacaaaaaggagagtagaaagagactgaggcagaaaaatatttgactgactagacaaatttgttgaaatatataaattacttctaatatagcctcaccataaactcacacgtcatacaagctaacagaagagctgtcccccaaacaaatacatttcactaatgatgcagagctcaaatagcacaaaagaagtaattcatcctctggataaatgatttccaaacagttgattacatactcctactggcaaaaaattaagtagtcagatcacagatatattaacgtataaattatatatgggttactgaatactaatctgttatttaatctaatatgttatatatgttactaatctttattaagttattttttaaaagaaattagaggacagagaaagatggccaaatacaagccttcaccgatcatcgccgcgacagaaacaacaaatttaacaaccatgtccacaaaaaagcaccttcataaaaaccaaaaataaggtgagcaatcacttcgtatcacagaaaggggcactgaagaaggtaagcaagacagtcttgaattgctattccccccaaaagcagctgtgtgtcatggagcacctacgcgcctgggagtgggagagtgcagcgactgtgggatcctgcattgaacagtgctgccctgtcacagcggaaagcagaacaagactaaaattagccaacgtccacctacagagagagtattaagaccagccctagccagaagagaactgcacatcccagtggctggaaacagtattgacaagcctcaccaccgtggcttaaagtgcttggggcctctaaataaacttgaagggcagtctaggccacaaggactgaaattcctaggcaagtcctagcactgtgctctgagtccactggctctgaacatgaggggcatgtgacctggtaagaccccagctggggcagctaaggaagtacttgcgccactcctctccaacccctggcagcgcagcttgcaacaacaaaagtgactccttccatcagcttgaggagaggagagtgaaaagttaaaaggactttgtcttgcatcttggatactagctcagccacaatcgaataggaaaccaggcagtcatgaggaccccattccaggtcccagctcagtcatgaggaccccattccaggtcgtagctcgggcaacatatatacacacacgctgggccagaagggaacccgctgccttgaagggaatgacccaatcctggcaggattgattacttgctgactaaagagcccttggaccctgcagaaccagaagcaacatccaagtagtaagccatgggccttgggtgagactctgaaacgtgccggcttcaggaatcacctcggacacagtggtgtaaagcaccaaaagggctcctgagatccccgattctaggctttggctcttggacagcatttctggacatgccctgggccagaagagagcctgctgcccaaaagggtgagtcccaggcctggaagcattcaccacaagctaactgaagagtccttgggccttaagcgaacattggcagtaacctggcagtattccccatgggtctgtggtggtggtggctagtgggagatgctcctctacctatgtaaacaggagggaagagtgggaaagactttgagcaacatcttagccacagaatagagcaccagtcagatttctaagagtttttattccactccttggctcctggatggcctctctagacctgccaagggcctcaggaaacacgctaccctgaagggaaggacataagccttactggcttcgccaactgctgatggtagagccctagggccttgagtgaatatagagagtagccaggtagtggttatagcaggccttgggtgagacccagtgctgtgctggcttcagatctgacccagcacagtcccaatggtggtggccacataggtgcttgtgtctccctacacccagctccaggtggttcagcacagagagagagagagcaacataccatttgtttgggacaaagtaatggaagaaaacaagagtctccacctggtaaccaacagaattcttccagatcttatccaagaccaccaaggcagtacctctatgagtctacaagaaccaaagcattatgggcttgggatgccccctaatccagatacagcttagatcacaatagccagtcccttcaaatacctggaaagccttcccaagacagatgggcacaaataagcccagactgtgaagactataataacagtccagacactgacaaacatccacaagcatcaacacttcctaggaaaacatgacctcaccaaaaaactacataaagaaccagagaccaatcctggagaaacagagatatgtggccttttaggcacagaattcaaaatagctattttgaggaaactcaaagaaattgaagataacacaaagaaggaattcagaattctatcggataaatttaacaaaaaagatgaaatattaaaaaagaatcaagcagaaatttgagaattgaaaaatgaaactgatatattaaagaatgcatcagagtctcttaacagaattgatcaaacagaagaaagaattagtaagcttgaagacagcctatttgaaaatacacacttagaggagacaaaaacaaagaaaagaatacaaaagaatgaagcatgcctacaagatctagaaaacagcctcaaaaggacaaatctgagagttattgtccttaaagaggaagtggagaaagaaataggggtagaaagtctattcaaagggataataacagagaactttgcaaacctagagaaagatatcaatactcaagtacaagaaggatacagaacaccaagcagatttaacccaaagactacctcaaggcatttaataatcaaactcccaaagatcaataataaggaaaggatcctaaaaggggcaggagaaaagaaacaaataacgtacaatggagctccaatacatccggcagctgacttttcagtggaaaccttaaagccacatgagagtggcatgaatatatttaaggtgcagacggaaaaaaactcttaccctagaatattatatccagtgaaaatatccttcaaacatgaagaagaaattaagacttccaagacaaacaaaagctgaggtgtttcatcaccatacctgtcctacaagaaatgctaaaggaagttagttcctcaatcaaaaagaaacagatgttagtaagcaacaagaaaagaaatcatctgaaagtacaaaattaattggcaacagtaagcatacagaaaaacacaataacaccataacttgggcatataaattactcttaagtagaatgactaaaagatgaacacagacactacaataaaatataaacagaaacaacaaaaagttaaaaagcagggagataaaggtaaagtgtagagcttttattagttttctttttgcttctttgtttaagcaatcagtgttaaactgtcaccagtttaaaataataagttataagatagtatttgcaagcttcatggtaacctcaaatcagaaaacatacaacctaccaatattgaaccaggaagaaatccaaagtctaaacagaccaataacaagtaatgagattgaagccataataaagtgtctcacagtaaagaaaagtccaggacctgatggctttactgctggattctaacaaacatttgaagaactaataccaatcctactcaaattattccgaaaaataggggagggaatacttccaaactcattcaacatggccagtattaccctgataccaaaagagacaaagacatatcaaaaaaaggaaaactgtacaccactatctctgatgaatattcacatgaaaatcctcaacaaaatactataatagcaagctgaatttaacaacacatgaaaaagatcatttatcatgaccaagtgagatttatcccagggatgcaaagatggttcaacatatgcaaatcaatcaatatgatacatcatattaacagaatggagaacaaaaacaacaagatcatttcaactgatgctgaaaaagcatttgacaaaattcaatgtctcaccgtgacaaaaaaaaccctcaaaaaactagggagagaagaggcatacctcaacataataaaagccatatatgacaaccacagatagtatcatactgatgggggaaaaactgaaagtctttcctctagatctggaacacaacaaagatgcccactatcaccactgttattaaacatagtactggaagccatagctagagcaatcagacaagagaaagaaataaagagtggtggcacttgcctgtggtcccagctgcccaggggagagggggctgaggcaggagaatcgcttgaacctgggaggcggaggttgcagtgagacgagatcacgccactgcacttgggtgacagagtgaaattcggagagaaaaggaaggggaaggggaaggggaatccaaattggaaaggaagaagttaaatttcccttgtttgcatatgatatgatcttatatttggaaaaacctagagagtccaccaaaaaactattagaagtgattaattcagtaaagttgtagaatacaaaatcaacatttgaatatcagtagcatttctatatgccaacagcaaacaatctgaacatgaaatgaaaaaaagtaatcctatttaaaatagctacaaataaatacctaggaattaaccaaagaattaaaagatctctacaatgaaaacaataaaatactggtgaaaaaaagtgaagaggacaccaaaaaatggaaagatattccatgttcacggattgcaagaatcaatactgttaaaatgtccatagtacccaaagcaatctacagattcaatgcaatccctatcaaaatactaatgacattcttcagagaaattaaaaaaaaaaaaaacattagctcggcgcagtggctcacgcctgtaatcccagcactttgggaggccgcggtgggcagatcacaaggtccgaagttcgagaccagcctggccaacatagtgaaaccttgtctctactaaaaatacaaaaaattagccaggtgtgctggcatgcacctgtagtcccagctactctggaggctgaggtgggagaatcgcctgaacctgggaagtggaggttgtggtgagctgagatcacaccattgcactccagcctcggcgacggagtgagactgtctcaaaaaaaaaaaaaaaaaaaattataaaatttatatggaaccacaaaagacccagaatagccaaagctatcctgagcaaaagaacaaaactggaagaatcacactatctgacttcaatttataccacacagctatagtaaccaaaacagcatggtactagcacaaaaacagacacacagaccagaagaacagaacagacaactcagaaacaaatccatacaactacagtgaactcaattccaacaaaggtgccaagaacacacattgggggccggacacggtggctcacacctgtaatcccagcactttgggaggccgaggcaggtggatcacgaggtcaggagatcaagaccatcctggctaacacggcgaaaccctgtgtctactaaaaatacaaaaaattagccgggcgtggtggtggcgggtgcctgtagtcccagctacttgggaggctgaggcaggagaacggtgtgaacccgggaggcggaggttgcagggagctgagatcatgccactgcactccagccagggagacagagcaagactccatctcaaaaaaaaaaaaaaaaaagtaacctgtttcatagtttaataaataatgttttctgtttcttagttgtacaaaaaatgatgcatcttacaatagcatcttatggagtcaatgaaaaataataaatgtacaggccaaaacacatcaagttttcttcatccaactaactagaaaaatagaagacccaccatacacactagattaaggctacttagagatgagagacagtagtatgatcgatctggtcttcaagtaattgggacttcagttattaattgttccttaagtctcattctataataaatgtgcttaattataattttaaaagtacttacgtacattgtgaggaaatcaatatatagctattaaaatatgtaatgttttaaatgggctttaaagcttcaaaaactaaaatgccccttgaaaactaggtttagagggaactaaaaactactaaattatttaataggtgatcatccaaaataaaatgtgtaacaaaaggaaacaatgtaaggttacagtaaatatgggatttaaatacagtaagaagacaattcaactgtcagtaaactccctgtaatgctaggaaaatgaatgctaggattatcagagattttttaattttgtttcatttgtatttgccaaaaaaaaaaaaaacacccatagaataaaaaataccagtttctcttgtaatttgcattttttaccaccacatttccccttctggaaggaattaaaggaagattactaagatgggtcaagtaacaacagaggacaacaagtaaacaaagaagccacagaatgtagggcaatgcttatcagtttaaccaagtgaatcaggagactatgaatgtaatggaacaaatttagccataaattcactgagctgggacaaccatctgaaaacctacactgtgatctatggatttacacaaaaggtgcagaactggaaagtgggagaagaaaactgtataccaaattatttcctaggaattatccagtctgatgatttttccactttaaaactttctgatcacctgagcccaggaggtcaaggttgcagtaagcagtgactgtgccactgtactccagcctgggcaacagagcaagaccctgtctcaaagaaaaaaacaaaaagaaaaagaaaaaacaacattataaaactcaaatatttctaccacaaaattaaataagagattagaaaagtgaagtttttagccaggtgcagtggctcatacctgtagtcccagcatttgggaggctgaggcaagcggaacacttgaagccagaagttcaagactggcctgggcaacatggcaaaaaccatctctacaaaaaatcaaaaattagccaggtatgatggaacatgcctgtagtcccagttactgaggaagttgaggcagaaggaatgcttgaccccaggaggttgaggctgcagtgagctgtgttcatgccactgcaagccagcctgggtgatgaagcaagcactcttttttttttttttttttttttgagatggagtctcgctctgtcacctaggctgtagtgcagtggcacgatctcagctcactgcaacctctgcctctgggttcaagtgattctcctgcctcagcctcccgagtagctgggattacaggtgcccgccaccatacctggctaactttttgtattttttagtagataaagggtttcaccatgttggccaggctggtctcgaactcctgtcctcaggtgatccgcctgcctcagcctcccaaactgctgggattacaggtgtgagccaccacgccaggctggcgagtactccgtcttaaaaaaaaaaaaaaactacaatggctgataaggtaagaattagagaccagttaccatctgaactctcaagatacttacatgtaaaagaagagttgtatggtcatactcacctttctaccagaaatacttctgggatgtttttattcatgtatgcattcatttattcatttatttaacaaatatttattcagttcctatgatgccaggctgtttccaacctctgaaggcacttgattcaagccacaagcccaatttcctctactgcccacccccaactccaacagctcaagggcagttagttcaaatctttctgaataagaagataagggtagtaaaccacaaagaaccacactacggcctgccaataaaactagctaatttcattcaacctgttaaaatccaatcagaaagaaaaataaaccaaacataagaaaatttttgcgatctacagaactttagggctgggcgcagtggcccacgcctgtaatcccagcactttgggaggccaaggcgggcggatcacctgaggtcaggagttcgagaccagcctcaacatggagaaaccccatctctactaaaaatacaaaattagccgggcatggtggtgcatgcctgtaattccagctactctggaggctgagacaggagaattgcttgaacccggaaggcggaggttgtggtgagtggagattgcgccattgcactccagcctgggcaacaagagcgaaagtccgtctcaaaaaaaaaaagaactttaggatttgatagcatatctaatattccaaaataaatacatataatttcttaattgacatgccatctgtcaataaaagatttaaaaggtaatctgctacaagtcttcattcttatcactaacctttcttcatgtgctaacatgtacatttccttctttactgtgccttgactttccaaataaatttgtgtgtgtgtctgtaacagaatgagagacagacaaacagagacgcatttgggttttattataacgtattcacaccttaaggaaggagaaaggctgaggtagcaaaggaaaggaaaaaagtaaatggaattataaaagtgatggcttaaaaaaaacatacatatcacaaaactgttcttcctagcagcaattctctaacactcaaatttgtctatctagctatctaactcttaagaaagtaattaagcatttttaaataagtcttaaaaagcacggtggctcatgcccgtaatcccagtactttgggaggccaaggcgggtggatcacctaaggtagggagttcaagaccagcctggccaacatggcgaaaccccgtctctactaaaaatacaaaaaattaaccaggcatggtgacaggcgcctgtaatcccagctactcgagaagctgaggcaggagaatcacttgaacctgggggtggaggttgcagtgagccaagatcgcatcactgcactccagcctgggtgacagagctagactccatctcaaaaaaaaaaaaaaagcttatattttaaattaaaaaataaaacaaaagctcatgttcccttctaaaataagacctatgagaaaagttccaccatggaactagtaaaatcaaaataactattttatgttagttcagtctatgtaaattgtactgtaaagtttttgtatttagcattttagccaagataaaaatttaataaatacaggttgaaatctagaattgcacttttttttaatatatagtttttttttttttaattgagatggagtctcgctctattgcccaggctggagtgcagtggcaccatctcggctcactgcaagttccgcctcccgggttcacgccgttctcctgcctcagcctcccgagtagccaggactacaggcacccaccaccacacccagctaattttttatatttttattagagacgggatttcatcgtgttagccaggatagtcttgatctcctgacctcgtgatccgcccgcctcggcctcccaaagtgctgggattacaggcgtgagccaccgcgcccagttgaattgcacgtttttaatggtcatatttttatatcatgttgttaggaggaaaaaataaaatacctaagaatgatagttaaaaatccaaatgattctttactatcctactactctaattttaaatcaacattaaatttttcccagtatatttaatacatattataactaaaacattttaaatgtataaaagtgctttttttttggtagagatgggggtctcactttgttgaccaggctggtcttgaactccttaaaagtacattttttacagtcacacaggcaaattcacctaaataatttacaatgtagaattgaacatagtctgttaagggtgctttcaggtcatcagaatctgaaaattatacattaaaatagcagtccccaacctttatggcactagggaccagtttcacaaaagacaatttttccacagaacgggggtcagaggtgggtggatggtttcaagatgaaactgttccacctcagcgggagatgaacggcaggcaagcgagcattaccacctgagcttcacctcctgtcagatcagtggtagcattagattctcataggagcacaaaggagggatctgggttgcttgctccttatgagaatatgtacatagacctgaggtacatagacctgaggtactacagacttggtcaacttttggcctccttcttaaccatcagaggatgctaaaacatggtctgaaacagaatgtagacaaatctgacaaaatctgtcaatctggtaagatggttaaaataaagggaaggaagtagactgctatcccaactgtttccaaaccaatcactgaaatctccaatacacaaatcaaagccatcatgctaatttttgtcattccataaagggtagcaaacgtaccataaaaacaaaacagagatctactcatgttgtggtgactgaaaacaaagattttacaggcctttttacttgacacaggatgccaaggaagcttctaactgcagaagaacagaatacagatcccaaggaaaagcaacagcccaaggggcaaggaagtgagggggaaggcagtaaagaaaatgatactcgtgcgataggtgaaaggagagaaagggaatctgtggaaacttccaccttctgctaaagaacagaaaaaaatcataggatattccattcgaccaacaatataccctctggggccagggagtagagaagctagctgaaaacagcctcattagagtcaaaatttgacatgtctcaggcaaaatcattcttaaagttttgttccatatcaagttttcatgtcttcagatttacataagaagggttttcctcatctataaccaattaattggcatttccagctagaaataagaacttaaattacacagtggtcccaatgattaaaagctcccaggattgtaaacagactttgatttgcaattaagaatattttactcctactccagtaatgacaagagcaaaacaaaaatacatcaagtctttctcaaagccaatacagtaagtactgaagaaattgtgctaatgccttaaaggttactgaaaataaggtacttacagaagtatgcatataaatctctactagaaaggataaaagtgccagtcagcaagttcattcaggccagatgtggtggctcacctgtaatcccagcactttgggggactgaggcgggcagaccacttagtccagtcaggagctcgaaaacagctgggccaacatggcaaaaccccgtctctactaaaaacacaaaaattagccaggcatggtggcaggcacctgtaatcccagctactctgcaggctgagacaggagaatcgcttgaacctgggagacagaggtggcagtgagctgagatcgcaccactgcactccagcctgggcgacagagtgagtctctgtatccaaaaaaaaaaacaggccaggcgcggtggctcacacctgtaatcccagcactgtgagaggccgaggcaggcagatcacctgaggtcaggagctcgagaccagcctggccaacatggggaaaccctgtctctactaaaaatacaaaaaattgccgggtgtcctggtgagcggctgtaataccagctacccaggaggctgaggcaggagaatcgcttgaacccaggaggcagaggttgcagttagcagagatcacacaacttcactacagcctgggtgacagagcaagactccgtctcaaaaaaaaaaaaaaaaaagtgcattcgccttattgaaaactcttcttataatatcaaacccaaatcagcatccatcatcatagattattagacttctatctcaaatacacaagaaaaaaataataaagtcaaaccctatgtataaacccatggtgacctcaggcaattttaaatccaaaattattcaaaattatttgaagggataaagaatcaaattgccagcaccctcaaaatagaacagtacaggacacactggatcccattattgagcatggtactactacattcaacacaccatggatattatttcatcaatttcatataaactttggcagcagactttaagttcctagaaaattgttccccaaagttttgtaaccttaattaaagtataataattccaagaaacaaatcacagagaggcaaagaaaacaaacatatagaggccatgatgtcattagttaaaatgacatatgaaaaaatgcaagaatgttgataatgattaaagctggctgatgagttcataggttttcttttcgcttttgtgtatgtctaaaattttctatgagaaacagaatatcaaattttttttttttgagacacagtctcgctctgtcaccaggctggagtgcagtggtgcaatctcggctcactgcaacctctgtctcccgggttcaagctattctcttgcctcagtctcccgagtagctggaactacagctgcgtaccaccatgcccagctaatttttgtattttcagtagagacagggttttcccatgttggccaggatggtctcgatctcttgaccttgtgatccacccacctgggcctcccaaagtgctgggattacaggtgtgaaccaccgtgcccagccatcagattttatgaacagtatatcaaactcaccaaaatgagtttttattggctgtttataaattgggggtgggggggacacggtaattatcattaattaagtgcctataaagtgtttgtttttttgttgttgtttttttgttttgagacagagtctcactctgtcacccaggctggagtacaatggcacaatctgggatcactggaacctctgcctccagggtttaagcaattctcctgcctcagcctcccaagtagctaggactacaggcacgcaccaccaccccgcctcactaatttctgtattgttagtagagatggggtttcgccatgttggccaggctggtctcaaactcccgatctgaagtgatccacccaccacggcctcccaaagagctgaaattacaggtgcgagccacagcccccaagtaggtgttttaatatataagaactctgtggccaggcatggtggttcacacctgtaatcccagcactttgggaggccgaggcaggcagatcacgaggtcaggtgttcgagaccagcctggccaatatggtgaaacctcgactctactaaaaatacaaaaagtagccaggcatggtgacacacacctgtagtcccagctactcaggaggctgaggtgagagaatcgcttgaacccggaaggcacaggctgcagtgagccgagatcacgccactgcactccagcccgggcgacagagcgagactccatctcaaaaaaaagaactctatgagatagaatcagcccaattttacataaaagaaaattaagaatcaagagggtaaacttaatcttcctcaagatcatataggagctgaactgagacccacagccaaagaaagaaagaaggaaataaaaaaggaagacaatgactggtaaagggggtaaaaaaaaaaacctttttggcactaatatacaaaagaaacaatcagagaaataagccaggcatgcatggtggctcatgcctgtaatcacagaactttggaaggctaaggtgggataatggcttaaggccaggagttcgagaccagcctgggcaacatagcaagacccccatctctatgaaaaaaaatttttaattagaatttaattttttttaattagagaaatacaatttccagaaaatatcactaggtaaaatattcttatagaagtatgcaataacaaatattcaagcaaaatgaaagaaaaaatagaactgtatttagaaatctacactgtaagggtggatatcttgaggattagaatccagaggagaaatcccatttcagccatgatgttaaccagttgtgtgtgtgtatatatttacatatatatgtaaattcacatatacatatccatatcaaaacttccctaaacctgaatttaacatacaacttagaatagattaagaaaatgttctaaaaagtgtcattacatatttaacgtggtagtctatatttatcatccagaagaatttagcatataatcctcatatttgaagttcactgtacaaatacattactccaacactccagtgttaaggcaagcatctaaaagtaatattttgctgggtatcgtgactcatgcctgtaatcccagcactttaggagaccaaagtgggagaactgcttgaggccaggagtttcagaccagcctaggcaagacaacaaaaccccgtctctacaaaaaaaaacaaaacaaaagaattagccaggtgtggtggcatgtgcctatagtcccagctacttgggaggctgaggttggaggatcacttgagcccaggaggttgaggctacagtgaactgggatcacaccagtgtacttcagcctgggtgacagagcaagaccctatcacatggccaggcacagtagctcatgcctataatatcagcattttaggtggccgaggtgggcggatcacttgaggccaggagttgagaccagcctggccaacacggcaaaactctgtctattactaaaatacaaaaagtagctgggcatggtggtgcacacctgtaatcctagctactcaggaggctgagaggcacaagaatcacttgaaccagggaagcgctgaaccagggaggcgctgaacctcggacagggaggttgcactgagctgagattgtgccacagcattccaacctgagtgacaaagtgagactctgtctccaaaaaaaaaaaaaaaaagaagacgaagaagaaaaagaggaggaagaggaggatgaagaggaggaagaggaagcgtaagaagaagaaacaacaacacaattaaacaccactacaaacttactagaatgactaaaatttaaaacactgataataccaagtgctgacaaggatggagaacaactacagcaactacattactggtaggaatgcagcatgctacagccactttggaaaacagtttgacagttcttatgaagttaaacatacatttaccataccaagcacactcttcagtattcacccaggagaaaggaaaacatgtccaccaaaggcctataggcaaaggtttggggcaacttacccaaagtaactggataaacaaattgtaattacatccatagaatagaatacttctcagcaaaaattaaaaaagaaacaagcaacttaattatgcaacgacatagaggaatctcaaatgcaatttgctgagtacaagaagctagtcacgaaaggctacttgctacatgattccatttttattcaacattctggaaaacaaagtgacagggacagaaattagatcagtggttgccaggggatagggatggggaagagagaaatgactacaaaggggtaaaagggaactttttgaggtgggggaaatatctcatataccaaatgtgatggttgttatatgaccgtatacatcaatctacacaactcaaaagggtgaattttattctatgtaaatcataccttaataaacctgacttttaagatgacaaagatgtaatctctgccttcaagctcatgatctaatgagagaaatatatataaacacataatttgaacaaggtaaatgctatagtaagttatgaacaaagttctgtggtagaatggaggaggaataaagtctgtctcagagtgaggcaaaggattctcagagaaaataacatgtaagctatgtcttaaaagtaacaaggctgggcgcagtggctcatgcctgtaatcacagcactttgggaggccaaggcaggtacaatcactgaggtcaggagttcgagaccagcctagccaacatggcgaaacccagtctctactaaaaatacaaaaattagctggacacagtagcgtgcgcctgtaggcccagctactcgtgaggctgaggctagaaaatcgcttgaactcgggaggcaggggttgcagtgagccgagactacaccactgcactccagactgggcaacagagcgagactccgtctcaaaaaaaaaaaaaaggtaacgagcatgatgatgacagaccaagaagaaaaggacccaagcagagagaacagttgagagaaaaaacacagaggtatgtaaaggcaagattagccatgtgagagacagtaaacgaagtgtaggatgagttagagcatcagaggtcatgccatacatgataagatttgtgttttagaaagataagtataaatatcatgtgggaaaatatatggaggtatagaatgactggcagagaacaagaacagttttgaagggtgttacaataatcctagaaagagatacctggggtctgaattaaggttcaattaaaaggctatttagtgaaagactacttatgggaataaggaagaaaagacaagttaaggttaattgaaatttctgcaaagaacaagtgatcatcaataagatgagaaacataaaaggaaatacagatttgtttgataatccaagttggggggagaatcatctggcttccattttcctatctactaactctcttccttgtaggcatgccttctctaactaaaactgatatttattatgacttatctacttgaactattttataaaataactataagaagtaaaggcaacacagcaaaacctcagcaaagtttttacagtatcttagatatagcagaatagttattttaaaggtaaaaataaggccgggtgcagtggctcacacctataatccacgcactttgggaagccaaggcaggaggattgtttgagcccaggatatcaagaccctagcctgggcaacatagcaagactccatctctacaaaaaaataaaatttaaagaaattaaaaataagttttaaaaaagaaaacattgggcagtttggctagagcataattattagaacagataattagatttcctagtttttcaaaaatttgaattgtaataaaaggaaatttcaatgttctatttcaattttcagcagcaaataaatgtgtacaaaaaggaacttaaagaataaaaaataaatgaaaataggagaggaaagaataaatttaaatactgcatcgccaacttatgtaataggttccaaatttgtctttaaaaagcaattatgtgatggctaggcatagtaggctcacacctgtaaccccagcacgttgggaggccaaggcaggtggatcacctgaggtcaggagttcaagaccagcctgaccaacatgataaaacctcattgtattagtccattttcatgctattgataaagacatacaaaagactgggaagaaaaagaagtttaattggacttacagttccacatggctggggaggcctcaggatcatggagggaagcaaaaggcatttcttacatggtggtggcaagagaaaaagaggaagatgcaaaagcagaaacccctgataaaaccatcagatctcatgagacttattcactaccacgagaacagtatgggggaaactgcccccatgactcaaattatctcacaccgggtccctcccacaacacatgggaattatgggagtacaattcaagatgagatttgggtggggacacagagcaaaaccatatcacccatccctactaaaaatacaaaaattagcctggcgtggtggcaggcacctgtaatcccagatactcagtaggctaaggcaggagaattgcctgaacctgggaggcagaggttgcagtgagccgagatcataccactgcactccagcctgggcgacagagcaagactctgtctcaaaaaaaaaaaaaaaaaatcaattatgtgaaatttagaatatattgccccaaagaaacaatgtgacactaaagcatagctaaacaatactagggtattacaccaacctgctgaataaccaaccccaccaccatcaccaccaccaccaccactaccactaccactaccaaagtacagtgttgaggagaacagggtgctctgaggctgcctgaggttcaacatcttttgtgacctcgactggggtaattaattctacaagtctaatattcctcacctttaaaatggagatgataaaatcacctgctccacacgagttactgtgaaaattaaaagagggaacctaaagcacttagcacagtcatccatccaacatgtatttattaagcacctactacatgttaggtacaaggccccaaggccctggcaatgaaacagtaaacaaaaaaagtaagtccctacttttatggagtgtgtattctaataaaagaaaacacgcaataaaaaaaatctgatggagttaatgctatgaaaataaagcaggatataagagataaagagtaacaaggagaaggatactattttggtagtggggaaaggttctctaataaggccacaaattttaacaaagaccataagagaatgaagaagagggtcatacagagaactgggggaagaaatcagatccatttctggcaatatggtagactagatgcccagaaaagtacttgtgattcagaatttcttaaaatgctgaatattaaaacaaaaatagtatttttcatgagtggctgagctgaaagaaagaaaaaacaacaaagcattggtgagcactgaaaccagcctctcccctgggagcatccatcaattccccagtggcttagaagtcagtttaagggactggtgagaaggacataaaggttggggcctaaacaaggtgggaaatctgaaaagcaacactcagtggatgaactgcagaggagggtaaacaacatgctaaacagagatcacagttggcatgtttgcctttcccagtctcggtggaagagaaaaaacgaagtcacccttcgctcactccagtttaaggacaaaattcatactacctatgtggtctagaaaaactcagactaaaaattcagtttcgagagattctgggttggaagagactagagcatgacagaagcaaacaccaatccagccaagaggagtacactaaacccaagccttcagtgatattcacaaataaaaatccatggaagattatctcacaattaaaaagaaattcacaaaataatgaaaaaagcccccaagaatcagcagaacaagcctttcaggaacagaagaaacgatgaggaacatgaaaataatcagatatataatataaaaatgttaatgtttaaggaaataaaagagatatagaaagtatgactgaggaaaagaaactgtaaaaaacatgaatatgaaaaaatcaaacaattgtaatgtttctggatagaaacattacaattgcttattgatagtcatacaataattggatatttgagaggagatcattctaggcaaaggaaaaaataagttcaaaggccctaaggtaagactgtgcttggcttgctttaggaagtacaaaagggccatggcatccagagttgagtaaacaaggaagaaaagtgggaagaaatgacgaccaagaactggtacttaataggtcacaaaatacctcaataaatattatttattatcccataatttctattggaaaaatttggatattagaaataataatttcttctttaccatttctgcattaaatatagaagccagagcagagctacagaggatctcaagtaggttcagaaggaaataagaaaatattccttttctatgaagtagggagagtcttcagtagaggtcccagtgccaaggaagacatctgggtcttgtgtgagcaaggtagaaatgaagtgattcagaagatacatttctggaaataataatgatcaacaacaaccaaaaaaaaaaaaaaaaagtcaagatggaattaccatttcaaagtaggagacatttcaaacttgggcattaattggtaatcaggacatcctcagagtactcaaaaatttcacggttcaagtgaacgtttacatcctatgacaatgagaatttagcataaatgaaactcccaaagatatgccaaactttttaactatctggtttaattctcaactttttctaaatattttcaaaagacactaacaagtagcaaaatagtactactctgatttttcttttcttccatattcctaccctcagactaaggtattgcctaaaaaagccatgaacaaaacacaagtaatacaggttaagaataatattcataagccacaactagaggtataatcaatccctaaatattaaagagttggtcattccattttttcctgattagcaaaataacagaaaattgactggtggatatcttaaatacatataaactaccatgcaccatttgacacatgaagaaatagatgcaaagaatcaaagtatgcattgttaaatcaatgataaaagttttaaaataattcattttctcaaagcttatcactcttaacaatgtttctaattatcataacctaatacaattcctgacaaatttaatcaaattaggttctaatacaagaacacaacttatattaataatcacacagtataacatggtacacacaaaattcaaaatcaaacaacctgagtccaaatgccatcttactaactatgacacttgagcatcattgaccactccaatcctgttttcatgctataaatcaagtttaataaagtactgccccatggagttgttacatggaaaaaataaaataatcccgtaaaacacttatgtttatcagcagactcagatatacaccctgacttacatctaggttccattctattataactggatcataaagcaaagcattaatttctttttttatttttattttattttaatttaagttcaggatacatgtggcattaatttcagtctttccttctgaagcaccacttaaataacttgacgtgactgttctcacacagtgcattcagcactatagaataaagtcagtgtctaacaataaaaactagaaagatatttgtgcaatatgttatgctaaatgtagaacttggctaaattgaaaattttctgaaatactttatgtaaataaagaaacagagcagtccctacaaatagaaatgactcctgaaatttttatgtcaaaagtcattgtgtcaatttatgtgtaatattcaagtgactaccaaatggtcatcatttgactcactcaaactattgtgtttcaaaagttcatccccatgcagataaacatgttaaagatagtataattcactaaaaatagtcaagttctctattgatacaaatgggatttctatgcaggttacttgtattcaatctaaatgactaagaacttataaagacttaagacgatcctgcaagaaagatgcctaaggggaaaaaaaaagaattaagataaagtagtattttgctctaggttgtttattttaagtgtgtagcggttggggaaaaaaacatgactcctttatattatcctaaaacattctacaattctttttttttttaataatcctttttgagacagagtctctctctgtcgcccaggctggagtgcagtggcgcaatcttggcttactgcaacctccgtctcccgggttcaagcgattcccatgcctgagcctcccgagtagctgggattacaggcgcacaccaccacgcccagttaatttttgtatttttagtagagacagggtttcatcacgttggccaggctggtctccgactcctgacctcaagtgatccgcccacctcggcttcccaaagtgctaggattacaagcgtgagccactgcacctggccaaacagtctataattgtaaaagctatgaaaactcttttttttttcttttttaagagatagggtctcggccgggcacggtggctcatacctgtaatcccagcactttgggaggccaaggcaggtggatcacatgaggttgggagttcgggactggcctgaccaagatggagaaaccccgtctctactaaaaaaatacaaaattagccaggcttggtggtgcatgactgtaatcccagctacttgggaggctgaggcaggagaatcgtttgaacccagggggcggaggttgcagtgagccgagatcacgccactgcactccagcctgggtaacgagaacgaaactccgtctcaaaaaaaaaaaaaaaagagagatagggtctcattctgtcgcccaggatagagtacagtggcataatcatagttcgctacagtctcaaactcctgggctcacgtgatcctgccacctcaccatctccagtgggtaggactacaggcacacactaccacgtagacctgatttttttgtttttttgtagatataggatctcactatgttgccctgggtggtcttgaactcctggcctcaagcagtcctcccacctgagcctcccaaagtgtcgggactataggcatgagcaaccgcacccggcaggaaaattcacttaattactaaaattttaaaacaccacctccacacataaaatcccccatgaataaatctatattttgttttggtaatacaaggttgctttctaagataacaattgctcatctgcctgtatgtataaatacatgtaagcatttgggaaagaagaaaaatgactaattttatcttcctacaatttcttcagtgatctacactagaactccattatctgaaattatctaaggtattcctaagcagaaaaataagttggtcaattgtagcctaagttggtcctatatttattcaatggctatcacacattcatcacttcgttataccttagacttccagcagataatgaatataacctttaaatccatcactttacaaatgcctacaaatattaggtaaatataacaaaaaatacttttcaatgtagaactgagcttgagtttgcaaagaaagaaagaaaggaaaatccccgagcctaaagtgaagaagaaacagaaaaataagtatctgaacttccattacaactgctgaagaggcaagaaagaggaagctagtactagggggcttgaattttatttcctttttagaaacaaacaaaaaaaaagtattcactcaagatggggaagtagagataaaatctctatataaatatgggatcctcaaaaggttgaccctcaggaaaaagtagattcttcctctcccccacaaaaaaacttccctggcacaggaaattacaaataattagtctttggctgggctgctgatttcctttttttttttaattctatagagataaggtctatgttgcccaggctggtcttgaactcctgggctcaaatgatcttcctgcctctgtctcccaaagtcctgggattacatgcatgagccaccgtgcctggtcactactgattatttttaagtttcctctaagatagtaaaattctgggatttcctctaagatagtaaaattctgctattcacataggaagtccaaatttacactactggcatgaacaacaaaccccagaatgacaaatttaaaaaacaaaacaaaaaaaaaaacaatttcaggtataatataccccctgaggctccaggcaaacttaatccatacgttctggtaataaacatttcctaagcacatactatgtgtcaagtactcttctaggggctagggatgcaataagcaaaacagacaaaaatctctactcttatgaaacataaacagtagtccctcttgatctacagggtatacattgcaagacccctagtggatacctaaaaccacagataataccaaatgctatatacactatgtttttttgtatacacacatacctatgataaagtttaatttataaattaggcacagtaagagattaacaacaataactagtaataaaatagaacagttagaacaatacacagtttccaatttttgacagtttgacttacaatttttcaactttatgatggtgtgaaagcaataagcattcagcacaaacctcaatttaacaatggagttacatcccaataaactcattgtaagttgaaaagtcaaaactaccataaatcaacaagtattttcaacttacaatattttcagctttagatgtaagtgcatcaagtcaaggagcatctgtgtaattcacaattacatggatagaagattcgtacatactgcaaaccttagcaacctcagcacatgattttttttccttgtaagtcaagaacttccacctattcacttaaaaaaagtgctttacaatgtctctgtgtcacatccaaattgccaacatcactactcttgtcccgaacattattaagtaaaataagggttacttaaacactgcaataccatgacagtcaatctgatcgtggagagggtagtcacttagtaaagtgactaaaggacaggtagcatatacgtagagcatggatacgctggacaaagggatgatttgcatcctagtcaggatggagcagaatgcttgagatttcatcacactactcaagagctgcacacaatttaaaacttaggaactgtcaagggcttcaagatggctgactagaggcatctcctacttgcctcctccactaggaataaccaaaatagtgagtaatcacaccttgaatagataatccaagaaagaacactggaattcaatagaaaaatgacaagaaacacctaaagaaaggaaggagagggaaacaagacagcctgctcggctgggagccgagagacaatccccactgcggggaaacagtaagtgggagactccctgtggtccacattcccactgtggactcctgcaattctagccattggggagcccctaggacctcatgggctctgaaactaacataaggatctgtctggaaatggtgcaacagcaccactccactgaggaaaattgcactgggtcccataatccccctaagtcctaagcagctacaacaaggcaccattttgacaacccagcccacaacagactgagcactatcctggggcccagcagctggtgcacagacagaagtaagaaacaggctgccaccaccaggactgaggcacaagcggggcatgtgtccccgaccgccgacctaggctgccaccattaaaggcagcctcatgttccccagtagcagcagcacagcacagccactgctgcccctcacccaatcattccagggcctgggaaccaccctgtcccttcttaccacagtaggtgtctgcacatattgttggggggcctgatgacatgccagcccagcttaaccaggtccccatgccaaagcgtgcagactaggggcctggggattgtctccctcagcccactaccattggcacctgaacacaacacctatcctgaggatagggctaccccccacctgccgctaccaccacagctggcatctacctgcatgaacaacctgcaaatctagagactggcaggcctagaccatcacacccaccgccaatatacacacacaccactcaggatccagtgggtcatctctgcctttacccatactatgctggctacccagaagactgagagtgcacccacccacacagcctatcactgccactaccagaatcacagcaatccatctggaagcccaggaattggttcacctcaacccactgatactggtgccagtgtatgctgccctagagcccaaggacaggcattctcagcccactgctgtcaccactgaggcctgaaaagtgccaaacatggcacctcagtccccagcaaaacttcaccacagcctccattaatagtccgaaccctaaggcccccaaaaaatcacagacgccactgacactgtttatacctgaaaaaaaatcacagagactatactaccacacagacccagaatcaaagccaatgcactctgcccaaccaacatcatagatacgtcttcaaataaaaagtcctcccctatgaaagcaagttcaaataatttgaaaaagtcattactacaccagaggaaagatatcaatgtaacgacagaggaaacataaaacagcaaaaaaaaaaaaaaaaaaaaaaaaagggcacctccaaaggaacataataattctccagcaacatatcccaatcaaaaacaaatttacaggccaggcacggtagctcatgcctgtaatcccagcactttggaaggctgaggcagatggatcacctgaggtcaggagttcgagaccagaccggccaaaatgatgaaaccccccccactaaaaatacaaaaattagctgtgtgtggtggtgggtgcctgtaatcccagctacttgggaggctgaggcaggagaatcacttgaactcaggaggcagaggttgcagtgagctgagactgtgccatcacactccagcctgggcaacaagagtgaaactccatctctcagaaaaaaaaaaaaaaaagaataaataagctcagtgagagacacaagagaataatgaaaactactacaaaggaatcagaaaaataattcagaatatgaataacaagtttaccaaagagatagatgatattaaaaaaaaaaatctggtactgaagaattaaatggccagatgcagtggctcaagtctataatcccagcactttgggaggctgaggtgggaggattacttgagtccaagagttcgaagccagcctgggcaacatggtggctgggcaacatggcaactacccccaaaaaattagctgggtgtagtggcacctgcctgtggtcccagctactcaggaggctgagatgagaggatagtttgagcccaggaggtggaggttgcagtgaaccgagatcgcactactgcactccagcctgggcaatagagcaagaccttgtctcaaaaaaaaatatgtgtgtgtgtatgtgtttgcgtgtgtgtgtgtgtgtgtgtgtgtgtgtaccaacatcatttttcacagaaatagaaaaaaacaatcctggtcaggcacagtggctcacacctgtaatcccagcactttgggaggccaagatggacagatcactttagttaaggagttcagatcagcctagccaacatggtgaaaccccatttccactaaaaacacaaaaaaattagtcaggcatggtggcgcacacctgtaataccagctacttgggaggctgaggcagaaggatcgcttgaacctgggaggcgaaggttacagtgagccaaaatcaagccacttcactccagcctgggtgaaagcatgagattcggtttcaaaaaaaaaaaaaaaaacaaaatcctaaaactcatatggaaccaaaaaaaagccaatagtcaaaggaatcctgagcctaaagaacaaagctggaggtgtcacactacttgacaagatgtatatcacgtctatcataaaagaaaacagcatggtactggcctaaaaacagagcgcataaccagactgggcaacatagtgagacaatccccccagcccccgccccttctctgcaaacaaaattttaaaattagccagctgtgatggcatgtaccatagtcccagctactcaggaggctgaggtgggaggattgcttgagcccgggaggctggggttacagtgagctgtaatcatgccgctgcactctagcctgggcaacagagcaagaccctgtctcaaaacaaaaagaaaagaaaaaaccaacacatagacgaatggaacagaatagacagacaatccagaaatgaatatgtgtatctatagccaactgctgtgtgtgtgtgtgtgtgtgtgtgtgtgtgtgtgtgtgtgtgtgtgtgtgacagtctcatgctgccacccagactggagtgtggggtacagtgacacaatctcagctcaatgcaacctccacctcctgggttccacaaatctcctgcctcagcctctccagtagctgggattacaggcatacaccacgatgccaggccaatttttgtatggtttgttgatacagggtttcgccatgctgcccaactgggttcaagcaattctctgcccggcctcccaagtagctgagaatacaggtgcctgccaccatgcccggctaatttttgtatttttagtagagagggggtttcaccatcttggccacgctgttcttgaactcctgaactcatgatccaccagcttcagcctactattatactttggggccactattaggtacaaatatgggtcacttgaatataatcactgcaatactgccgcaatcaatctgataacggagacggcaactgactaacaggcaggtagcatatacatacagcatgatgctggacaaagggatgattcacatcctggtgggacagagagtgatttcatcacactactcagaacaacatgcaaattaaaacttactaatggtttatttctgaaattttacatttaatattctcagaccatggttaacggaaggtaatagaaactgggaaaagctaacatgtgactaaggcagggtactcttgtaatggacagaaactgacaaaaagcaaaatatattaagttacataatatattagaagataaatctgttaagaaataaggtaacggctgggcgcggtggctcacgcctgtaatcctagcactttgggaggccgaggcaggtggattgcctgagctcaggagttcaagaccagcctgggcaacacagtgaaaccccatctctactcaagtacaaaaaattagccaggcatggcggcatgagccttgtaatcccagctactcgggaggctgaaacaggagaatcacttgaacctgggagacaggggttggttgcaatgagccaagagcatgccattgcactccagcctgggcgacagagcgagacttcgactcaaaaaagaaagaaagaaggtagggaaaaaagataagaagtggaggagagggaaatagtcaagaaatagtcaagaaagatgttaaacttacacaaactaatctacacaggattcccacaaataaaatcccacaaaaatttagttcagaatccaagattataaaacaccctgtaatggccgggcacggtggctcacgcctgtaatccagcactttgggaggtcaaggtgggcggatcatgaggtcaagagttcaagaccagcctggccaacatagtgaaagcctgtctctactacaaatacaaaaaattagccaggggtggtggcaggcgcctgtaatcccagtgaggctgagacaggagaatcccttgaacccgggaggcggaggttgcagtgagccaagatcgcactattgcacttcagcccagacaacagtacaagactccaactcaaaaaaaaaaaaaaaaaaaaaaaaaaaccctgtatataccacattagatgagagctaatgaatgaatactagaaaactatacagagtagattataagagacttttgaaaataatgacactgttctttttttttttggagacagagtcttgctctgttacccaggctttttttttttttttttttggagacgtaatctcattctgtcacccaagctggagcacagtggtgcaatctcagctcacaccaacctccacctcccaggttcaagcaattctcctacctcagcctccctagtaactgggactacaggtgcccgccaccacgcctggctaattttgtattttttagtagagaacatgttggccaggctggtctccaactcccgacctcaggtgatcccacccacctcggcctcccaaagcactgggattacagacttacagacgtgagccaccatgcccggcaacactgttctcttaagggtaaaacagactaaagtaattcaaaattgtacaatgaaaaatacaaactgcctaacaaataacttcataggaaacaaaataataaaggaaatatgcatcaaggttttaacaatatatcttttgcggaaaagaataatagggcagggcatggtggctcacacctgtaatctcagcactgcaggaggccaaggcaggcggatcacctaaggtcaggagttcgggaccagcctggccaatatggcgaaaccccgtctctactaaaaatacaaaaattagcagggagtggtggtcagctactcgggaagctgaggcaggagaatcacttgaacccagaggcggaggctgccgtgagctgagatcacgccactacactgcagtatgggtgacagagggagactccgtctcaaaaaaataaaattaaataaaataaaaataaaagaataataggaactaggcttcctaaagattgtacttttattttaaaaattaagacatttccatttaacacttttgaagtatcaaaacacttcaaaaagttctggagatacaaagataaataaaataccttattgtacatctatataagtattataaaacaaaaatgcattgtggacatttctgtttcaaccatataaaaactattttaaaatattttcaagaatatgtgtgtgaaaagggatgctttataaaaagtgaatataatagattagttcaactaggtcagtatgagaaataaaaagcttacttagtttttctattaattcacaaacaggaaaaaaaaatctgattttccagttcccaaatgatttctcagtttaaaataaatcaattcaaaggtcaacaaaactgtatgcttgcaggaacctaaattatcaagtctgtcacttccaggaaactttgaagttttaaaatttcaccaattcacccaaatttcttgtaattatcattaatattaatatataaccaataatatctactcatgatagctagtaaaatcccagcttgcttttttacaaaaattgatacgctgatcctaaaattcacatggaaatgcaaagggcccagaatagccaaaactgtcttgaaaaggaagaataaagaggtcttccctattttaaaactcgccacaaatcttcagtaaacaaaaggcaatttggtactggtttaagaatagacacatagataaatggaaaagaattgagtccagataaatccttacatttatgctcaactgatttttgacaaaagtgccaaggtaattcaatgggaaaagaatagcctttcaacaaatggcactctagccgggtgcagtggctcacgcctgtaatcccagcaccttgggaggccgaggcggacggaccacaaggtcaggagatggagaccatcctggcaaacacagtgaaaccctgtctctactaaaaaatacaaaataaaactagccaggcctggtggcaggcacctatagtcccagctacttgggaggctgaggcaggagaatagtgtgaacccgggaggcggagctttcagtgagcggagatcgcgccactgcactccagcctgggcgacagagcgagactctgtctcaaaaaaaaaaaaacaaaaaaaaaaatggcactcttaacaattggatatccacatacaaaataatgaatgtaggccgggcgcggtgtctcacatctgtaatccctgcactttgagaggccgagataggcggatcacgaggtcaggagatcgagaccatcctggctaacacggtgaaaccacgtgtctactaaaaatacaaaaaattagccaggcgtggtggcgggcgcctgtagtcccagctccttgggaggctgaggcaggagaatggcatgaaccaaagaggcggagcttgcagtgagccgagatcgcaccactgcactccagcttgggccacagagcaagactccatctcaaaaaaaaaaaaaaaaagaatgtagacctttcccttacccttatctcacaccatacaaaaattgacttaaaatgaatcataggcctaaatttagcagctaaaactataaagtaatgaacacaggatgtaaatgctttaaaattagattgtggtaataggtgcaaaactctttaaatttactaaaaatcattgacttgtatacttaaaatgagaagtttttttcttttttttttttctttttgagacagagtttcattcttgttgcccaggctggagtgcagtggtgtgatttctgctcactacaacctccgcctcccgggttcaagcaattctcctgcctcagcctcccaagcagctgggattacaggcatgcgccaccacacctggctaatttttgtatttttagtagagaccaggtttatccatgttggtcaggctggtctcaaactccagacctcaggtgatccacctgcctcagcctctcaaagtgctgtgattacaggcatgagccaccgcacccagcctaaaattagtggtttttatggcatgtaaaatacagttgtcccttgctatactggggacattggttccaggactcctgcatagaccaaaatctgagcatactcagataagtcctgcaatggccctgtggaacccagtgatataaaaagtaagcccttagtatgcaacagtttcacatcccaggaatactgtattttcaattcgagtttggttgaaaaaaaaaatcaccatataaatggacccatgcagttcaaactcatgttattcaagagtcaactgcatatctcaatgaaggtttaaaaaagccacctctaggctgggcgcagtggctcacgcctgtaatccgagcactttgggaggctgaggcaggcggatcacgaggtcaggagttcaagaacagtctagccaacgtggtgaaacgccatctctaccaaaaatacaaaaattagccgggcttgctggtgcatccctgtaataccagttactcaggaggctgagatagaattgcttgaacccgggaggcggaggttgcagtgagccaagatcacgccactgcactccagcctgggtggcagagtgagactccatctcaaaaaaaaaaaaaaaaaaaatatatatatatatatatatatatatatatatatatataaaatggtatttttttttcttatacagacaaggtcttactatgttgcacaggctggtgttgaacttctgacctcaaacttctgacctcccacctcagcctcccaaactgctgggattataggcatgagccactgtgcccagctcaaattttcaaatatagagtacaactgtttatatagaatttacattctattaggtattctaagtaatctagagatgatttaaagtatatgggagaaagccgggcatggtggctcaaacttgtaatcccagcattttcaggaagccaaggcaggcagatcacttgaggccaggagtttgagaccagcctggccaacatggtgaaaccccgtctctactaaaaatacaataattagctgggtgtggtggcacacgcctgtaatcccagctactcaggaggctgaggcaggagaattgcttgaacccaggaagtggaggttacactgagccaagatcgcgccactgcactccagcctggtgagggagcaagactctgtctcaaaaaaaaaaaaaaaaactagcgggttttggtggcatacgcctctaagtcctagctactcaggagactgaggcaggagagcagcttaagcccaggaatttgaggctacagtgagctatgatcaagccactgtactcaagcctgggcaacagagcaaggcgcggtggctcacgcctgtaatcccagcactttgagaggccagggcgggtggatcacgaggtcaggagatccaggccatcctggctaacacggttaaaccctgtctctactaaaaatacaaaaaattagctgggcgtggtggcacgtgcctgtagtcccagctacttgggaggctgaggcaggagaatggcgtgaacctgggaggcggaccttgcagtgagccgagatcgcgccactgcactccagcatgggggacagagtgaggctccatctcaaaaaaataaataaataaataaataaataaataaaaattttaaagagatgatttaaagtatacggaagatacatgtaagttatatgcaaatactataccattttatataagagactggagcttctgaaaattgtggtatccactaggggttctggaaccaatcccccacatatcaaggggtgactgtaattacttaacaaaaattttttaaaaaatcatgaaagtatgtatttgtcaccagctcatgggaatcactattcttgaattaggtagcactaaatacctttaaatacctgatggaagccttaaactcagcagcaagttcctgaaaacatgccaacatatattaattattctgggtctaaaagtttgacaaattactttaaaatacagatgaaaacaaaataaaatgttttaaactgcaacaagaaaaatgtacaagttgaccagaagtttgaaacacttgactacattggtgcactgttaatcaaaatttatctgcaaaacagatttgcaaaagaaattataaacagggtagtaaatttcaaagtaatttataacagactaaggtcaagctacattagcaaagttggaaggtagcacttaagaaaaaactctgggccaggcacggtggctcacacctgtaatcccagcactttgggaaggccaaggcaggcagatcacctgaggtcgggagttcaagaccagcctggccaacatggtgaaacctaatttctactaaaaatacaaaaaaattagccgggcatggtggtgcgtgcctgtagatccagctactggggaggctgaggcacaagaattgcttgaatccgagcagcagaggttgcagtgagctgagatcgcaccactgcactccaacctgggtgacagagtgagactccctctcaattaaaaaaaaaaaaaaaaaaggccgggcacagtggttcacgcctgtaatcccagcactttgggaggctgaggcaggcggatcacgaggtcaggagatcgagaccatcctggctgacacggtgaaaccccgtctctactaaaaatacaaaaaattagctgggcgtggtggcgggcacctgtagtcccagctacttgggaggctgacgccggagaatggcatgaacccaggaggcggagcttgcagtgagctgagatcgcaccattgcactccagcctaggcaacagagcaagactctgtctcaaaaaaaaaaaagagaaaaaactctggaaagttatatggctctaccatgtactatttggacacctctggaggagaggaacttgttcaattttaacagtataaactttattgtttaagtagctaatatttaggccaggcgtggtggcttaagcctgtaattccagcacttcaggaggctgaacgggtggatcacctgaggtcaagattttgagaccagcctggccaacatggtgaaaccccgcctctaccaaaaatacaaaaattagtcgggcctcatggcgcacgcctgtggtcccagctacttgggagtctgaggcaggagaatcacttgaactcaggaggcagaggttgcagggaggcaaggttgcaccactgcactccagcctgggcaacagactgagactctatctcaaaaaaaaaaaaaaaaaaaaagactaactatcaattaggaaatatttacgtgtagcagtactaacaacattgagatggactaatttacagaatcccaatactttcgttctaattttttttttcagggtgttgctctgcatgattgtagctcactgtagcctcgaactcctgggctcaagggatcctcccacctcatcctcccaagtagctgggaccacaggtatatgccaccatgcccagctaattttttatttaatttttttttttgtagagacagggtctcactatagtgcccaggctggtctcaaactcttggcctcaagtgaacctcccaaagctctgggattacaagcatgagccactgtgcgcagctgcttccaaagattttctagagtggccaaaaccccagataatccatgaaagagcatgaaaagtattttaagggacaatggaaggggagaaactgctacctaatattctcagcaacttttcctgccctacctgacaagcgaatgatattgaagaggagggtaactaactgaacagactcttctctctccttctatccaggcacctactatcctgcaaatacgcagctttgaaggacttaaccaatgaccttaaaatctataccaggtctacagttctaggaagcgtataagcaaatgctgctatagaatttggattttctttaatgataaaaatgcaaatgactcacgtttggtcatccactccaacacagcacattctaaagaacaggagttcaaatcctccttctgccaaaagatgttgtgtcttcacacacaaataagtaattatggattatattactaccacaaatttctgtttctcactgaaggcatatgacattttaaaaaagaacaaaaaatcagaaaggaaatgtttcaagtctattttgaggtaaagcaatcaatttaccatttatcttcctcagacttacatatgaaagccccacacacatgcgcacacacaagatccccaaaatgttgacaactgttgaagctgcacaacggataccagagttcattatactattctatttttgcatatatttgaacatttccataatatgcagttttttaaaatatgcatgtgtgtgtctataggtgtttatacataaactcccaataaactgacatagaaatatccaattgttcaaagctttcattcttcaaaagtaagtgaatttcttttttttttttttttttttgaaacagtctctcactctgccacccaggctggagtgcattggcacgatctcggctcacagcaacctccacctcctgggtacaagcaagcgcatccagctaatttttttgtatttttagtagagatggggtttcaccatgttgactaggccagtctcaaactcctaacctcaagtgatgtgcccgcctcggcttcctgaggtgctgggattacaggcgtgagtcaccacgcccggccagaattccatctagctactttcttattctagaagttgtactgcaggtgaccagaccattagagaaggtctagtgaaagaaataattaactgccccagaataaaacaagcctaaccttgaaaagaggcaaagggaaaggtgctaaacagttattacaattaactgcatgtttatatttggtcctgttatcctctaacacaggtgggtaggtagaaaagggggaagtattttagggccagatttccttttgattctttaagttgatgggcaagagaggctggaataaagaaatctaaaaagtctccattataaatgataaccaagccaggcacaatggcgcatgccagtagttccagctacttaggagacaagaggggagaatcgcctgaacccaggaattcaaaactagcctaggcaacagagtgagacctcatctctaaataaataagttaatgaattaattaaaggtagaattgtataatatatgaattatacctcaatttaaaaacaatttaagccctatacagtgatgcatgcctatagccacaactactcataagactgaagcaggaggatagcttgaacttaggagtttgagaacagcctgggcaacatagagaggcctcatccccctcccacccccacccgaaaaaaagcattcatagctcatcttagtataatcagcaacttccaatgactaactatgctttcctgctagacatgaatttataaaacacataaaaattatactgtatctgcttcaattccttttttcatattgccattcaattttcacaagattactttaaatgcaatcctaaattcatcaccaatttaacttttgttagttatgtctaaaaataaaactagtcaaaattaaaaatactaactttgcagcaaattaatcttgcatcagcactacaaacaaatttttaaacttattgtagcaaaacataacttcgacagaatcaaagacattaattctcaagtccaaaaaaaggtcacaagaaattatttaaagtggtaaagggaaacgcagacttaggcatacaagccaagaaaaaaaaaattagagataactcctccgctagaacctccccccaatacttccatagcaacaattatttccttagcacaaaagtgatgtgttcactttcacaaaacctggatcatctaagtttgcacaattcccttcaatctaaaaaacagatgaaattgtttcatttaggtgagtagaattttgtgtccctatacacgaaaaaagtcaccatcagtgtgagtaaaccacatggctccagctttaagatcttgttccccaacccactgaaaagagtatatgcttataaaatattcatggacttaccaggttaaagacagtttctacaatatccctattggatacttctccaacttcaaccaaaccggtcaacacggcaaatttcattctgatgcccctgatggggagccctggtttcagagacaatgcacccccttcagtaggggtttcttctctccctccacctcccccgtcatcacctgttggtggcggggaagggacacgattgtcttcgctagccattgctagctcacgataaaggacaactcagagtcaccctgggacggcagtcgctgcactggtaatgagcacaacacacgcaatgcaaaacgaaagggtccctcttccaacttgtggagataccccaaagcagttgatgtggaaagtccttggcgtcgccctcctcctcttggagaatatttgtccaatctctctccccgaggctgacaacaacgccaaaccctattggaagattaaatatatgttaaataggctaggttttgttttagggttttgaggggacaagagggaaatagttattgtcggtcaagtaagttactaaaggcaccccactactagccacccgcttctcccgggctcaaaaagctgggttctgggtgaaggcaggtccaagaggcccccgaacaggctcactcctcccccactctcgtgcaggttctaggcgcagggtaacctctcctcacaggtgcactagaaagagaaactgtcgcggggaaaggagggatcggaggaaagaaggggggcccacaagctatcacagaggtagaaagttcttcctcacccagatactccggactcgtcctcaccccccgcccaggagcagcgagaccgaggtggcggcggagatccagggcaggaaaaggcgggggaagggggcggtgattattctaaatgctcggcccagtgggaggagtgaagcacctctctcaggcacctgagattcgacgggaaggggtggggaggtgtgtgtggtggcaggaagggaggggagcggccagagaaacccagcggccaccgcagggagagaagggaggacagagaggtcagtgcacctggtcgcagcctccaagtttccctagtccgctccccgggagtccgcggctgcacagaactccatggcttcctggcccgccccgcccctgcgctcagcctttgcaaaagcagccgctgctggcgctacgggcgccgcggctgaggctgctgcgagtggtgaggatgctactgccacagctcgccccgccacgggtcgcgcggctgtcgtgtgcccactgaagctgctcccggccgccatgacagcgccgagtgctgccgggcgcggcgtgcgcgtgcgcgagcgcgagtgcgcggggcgggagggcgcgaaggcggaggcagccgcgcggcgggggcgcggtgacgacgcgcggacagccaagggggccccgagccagccggagtgctgggctggggcttccggctgcactaggcgcgctgctctggtagcaccaggtgtgtacccggcccggcgaggagagacccttccgtccgagggcctacactttcccctctcccactctcggacctcgggaggtgcttctgccaagtcctgaggcggggattttggcgctcctgctgttgttaagttaccgtagggtctcttggcgcggagggaacacgcgctgcgttgcctaggtgtctcattggacttggagaagaacacctgaggcacctctacgagccagagaggtgacggcgctggagccagtgaggctgctgtccctgcccaatgggagcgaggagtccccacccctggctgctttcagctgttgcccgcccgccgctctcggcggagacttggagatttccactgggatacctcggcagctgccgccattcgggaggggaggggaggggaccgagtcgacgaggaatgggaaagattccttgctttgcagctgccgcgccacgaaacctctcccacattcattctaggcagaggattcctgagacagctgctataaacagcgtggagacagggttccttgtgcctgtagacctccgaagggttttttcctctcgtgattttccaatgtgaagattaggctcgcgtcattctcagagtagatcaaaagataaattatattaggtagtacagataggtcctcatactcagtgtcccttctttccacccgctattaacagtaaaccattcttcctagtgagtgaaaaataaatttagaggaaggtggtttttcacccacgtgtatcctttgaggtcaaagggcctttttaaaaatacgcctagctcctaaaatgaaagtgaagcaaaaagtgggattaaacaaaggaagaattctagagaacttaggaaaaaattatagtggtttgagaaatagtttcctgaagaaaaagttatttgagatggccttgagaagtggacagaagccgggcgcggtggctcacgcctgtaatcccagcactttgggaggcccaagcagatggattgcctgaggtcaggagttcaagaccagcctgaccaatatggtgaaacccccgtctctactaaaaatacaaaaattagccaggcatggtggtagg

SEQ ID NO: 342 - DNA, 777607 bp, Homo sapiens
  source 1..777607: mol_type = genomic DNA
ttgtcccagtgcctggctcataataacctccgatacatttttgttatagaagaaacatcatttctcccagggactcctttcagacagctgcagaaacaaccactagtagttctcaggaatggagatgatattatgattattgactaattaattggttattgatttattattcaccatgagaaatatagatgggagaaataaatgaggaaaaagatcaaaatgggttagagtataccgtttgtggagaacaacaataacaacagcaaacatttctgtattgatttaagatttataaagtgctttaatgcgaacattatcttatttgttctcattgtaacacagtgagggaagcgaggctataactgtaaatctttttgctgatacccctcatggatgattcgattcacatgcaaactagtgagcaaagaggagaagaggagaagaaaggaggaaaaaagaggtttaggtaagggaaagttgctttatttagtttctattctttaatattcataactaattctgcgaggtcaatctcaccactcccattttgcagatgagatcacagagaattgaggtggtaacttgtttcaaatcccccagctgatgagtagtagagattggattcacacccaggttttctctctctctgaagccctggtcacctgtttggccctggggtgatggggagaaggttctggctgtgtcttggctatctcctgcctctccctctgtggggaatgtgttcgaggatcacagctacagcttttcggataccctttcctttgtgaagcatgtgagaaccaacattgcatctcggcaagatttaaaaggaattgttgatgacctgctgaggtattttcattttgttcctggaaatgattaatcttgaggctttgtgatggcctttgtcacaaatagccttccttaatccataattttctcactttcctttaaggtaatattttgcatttaagaaataaaaacaagcaaaataatcctgctgtgaggatatgaatgcagtgtttgtgtgtgggggtgtgtgtgtgtgatgctgaccaaggtctaaattcacctgaaatgaattagaaaaaccacctttttaaaataagttcagtttgtcttttttgctaactctatttgtcaatcttacctcttccttttattattattttttcttcttcctctttagcagatgggatggaatatttctgttttgttttttatgggtgatttttcaccggcttcttccactttatattgagtcacttaacatcctgtgaagcggaaaggaggccggtactttcagcctgaggtcggccagggtgctgcaattccggacagagagatgtttttcccttgggttgggaatggcatgttctgagcttcttttgacttctagtcctcgctgccggtgcagttccaagtagagtcaacataaagccaggcacttgtgagatggagaccggggcgaaactgcaagcagatgccctttgctgactgttgaagaaagaggatctggctgaaagacccgcaactttcacttgttgagaacctttagccagcgccggcgtgcatgtgttttagttttattctttttcccttgcccccaaagccgtggagtacctgctgttgctctcatgcctcttgccaacagtggcatctgctcagtgtagccatcaagaatttgaatgtcaatatctttgccttgaaatgaatggaaaagtatttgtcactcagcggcaatcattcttcaaataaaaggttagccagacaggacccttaatcaaagagtcggtcttttctgtcagcagtgccttttaaatagcaatgatgaaggctggctgtcagggtaggacttgatgagcgagatgattgatctgcataaatcattttcttttaacattgtcagtgaagagtaaattggtgggacattttgggtattagctgtgttgaaattaatatgcagtatcctaggtgtgtcctcgatcacatagtcctcataaaagaaggtagaaattaaaaggaggcttttaggcatgcattgttctaacaagaaagttgcaccattcttactgctgtggtcatcatcttgcatgctaaattcggaagttgagtgtgtagcacattttacaagctccaaaaggaatctagttaatttgggaattagctagagtcagtagcatttaacaaccagtaaatctgtaaagacttactgctcagaggcaaaaaaaaaaaaaaaaaaagtctgagaatggtttctggttttataggatagggtatctactacctagcatgctgttgtagaaatagactcagctttagatgaggcttaggcttgaatccacgtgccatccctccaaagtgagtctccttgaccatgatgtaagtattaacctttttgagtctgtttctttgtctctaaaaatgggatttcattagttaccttgggtggatttgcttttggtattaaacagagcaatctaggtgaaagcgccaggcacattacctgggacatggtgagcaagtgctcaataaatgttcatctcctccctttctttcaatcaagcgaaatgccccaaaccagccaagatgtcaagattaaggatatgccctcatggtcaaaataaataatacattgcctggtttgggtcattctgtatttactggaatatcttatggccatttttatgtcaaaaacatatttcagcaaggcagaagcaatacctaattgccgaatactgaaaatagggaatgaggtggaaggaatgggagagaaatatggccagggacacttggtttttcttaccattacactctagattatgtgtctgggttcatatgattaaactctgaacaagtgaaaccaatgcaatatagtgttgggattaaaagtaggactggtggagccagatggctcaattcagatcccagatcttccgcttaatggctatgtgactgcaggtaagagagctaattgcctccctgagcttgtttcctcacctataaaatggggatagtaatagggttatcttacagtgttgttaggatgattgaattagtatatacaaaacaaaacatgtaaaagagtacctggtatgtacatgttaaccatgattactatgaatggttagttggttaagaaaggtagataatgctggccgggtgcggtggctcacgcctgtaattgcagcactttgggaggctgaggcgggaggatcacgaggtcaggagattgagatcatcctggctaacacggtgaaaccctgtctctactaaaaatacaaaaaattagccgggcttggtggtgggtgcctgtagtcccagctacttggaaggctgaggcaggagaatggcgtgaacccgggaggcggagcttgcagtgagtgagcagagattgcgccactgcactacagcctggcgacagagcgagactccatctcagaaaaaaaaaaaaaaagaaacaaaggtagataatgctgaaattcaagtgggtcaacagtctcaaaggaagaaacatatttagatatagaaatgcatgataatggtatactggagtgaaatacttgtttcattttggagaaacttgcctactggaggaattttgagctaggctgattccaaaaacatccatattgaagcaaataggttttgtagggtcttcgggtaaatagcctttacttgctgtgttgaatgtgaaggttaaaggaacacagtcttctctagccagattctccatgcgccttctgtaatggtaaagtccacgtcaatcgctgcttgtgggcgtgtggcatggacgcgcaggagcctctgtaacatgcatgtggcatgcagctgcgtggattcctggagattattggagatttgccttctcttcattcttagagatgtgcatttgttttcctcaacttgcttttagctcagctgattggttgtatgtgagctttgtgctcctctcctttcctgtcttctgaatttatgctattttgaacttttggtctgcttctgcataatgagagaagttggcagaagacaattccagataaaccttcaccaaaactaatggttctgtggaagtccttgaacgggtgtggaggagcaaagctctcccagttcccaggtgagcccagggtggagatgtaagaccacaccgaacactgagcatggtcaccaggctgcttttgagaagcgactgtgaagctgtcctcctgcaggggcatgatggctatatttgagaatttctggaaaacattctctgcctctctggcttgcaatgctcttgggctgcaggagtggtaaaattgtgctgttagattcgttcctgattccatccttattagataaagcgtggcctgtgttatctaactgactacttaatggagtccacattgggtgtgatattctgctcaagattaatttcgggtaatgaagatctgaaacaaggtatttaagagccccactaatgtttcatttatagcaatctatcaaaacgatagatatttagcctctttactggatatgaaacattaacttaaagccagtgctgctttctgtgttaaataccagtacccctgccttcgattttatcaaacattgtgaaaaatctgccaccacctcccggagaacacatatcatggacttagccttaagttatgattctctggcaccttggacaactgaccaaccctagcttgggccctgcttgggccttttcacataatgagtagaattcacaaacaaatatttatcgggcacatgctgtgttcaaggcccactagacattgtgagggggacacaaagtggactcaatttcactgcatgcgatatgctggaaaagagatatcttagcccaaggggcaggctcattactcctaagttggttattacattgttcagttatgagcagatgaggcctagaaaaatctgggtcgcttctcctcataacaacttcccatttggggcggtatgaaaagtgtgggtttccatcaattctgatgagtaggtggagtccattcctcagcctttaggtgctccccattgtccaggagccaacagttgggtatttggggctccagaacaagtatccaggcacctaaatggtatctagctaatatttattgatgcatttttctaaggaaaaatgagcaatttccacttttcattttcaagcttaatactcatgactgtccagtattatccttacccctctctagttttcttctctttactgtttttattgttcattggaaatatgttggtttagtaccaattgtgtgctgttttcctatatggaatatattctttctgatttttttctgattcaaatggtatctattcttcagggcctttctgaagacccgtgtcttcctgaccatattctctgtgcagtttttcttctttccaggaagaattttgtttttcttctctgaattcataaacatcaaggtttgaatatgcatccaatgcttgaacatagatgatggttctctagatatttttttctatgtgtaattcattttccttttaggttacagcatctttaagaatagggacctatgcttaatatctcttccatagcacacacactacttttgggcacacaagttgtactaaaagcctagtgacttgacctggtccacaaggatgaatcctaaatggacttggcagtaattttgtgtaagaaaaggcagaggtatcacacaattgattttacagtgtgtcactctcagtgtagtgcttatgaccaccttggggaatgtgaatgaagcccccactagatttgtctgtgctgtcgccaaggacttaaccaccaggttgctgtttgcagctgtctctgatagtacattggggtctatagacttgagtgtctctatcttttctggctcttccgcatgcttggtggtggttcgatattctgttttgtacttctttgataccgtctctggggtccccttaattgggacaccttaatcggggagcccctgctgcctgggcagggggctgaagtcctgctgctttccctccacattgtcaggattcctgggtgtttcctgggttggagacgtcagcctggcggcatagcctgtgctttccccattacctgatcacgtttcatcagtgaaacgggatgtttcactgaaggcttatctcaggaggcgcctgaatcttatttgaccagaaatctttttggcagttggtgaacttggttggattccagtctgtccctttcattgtcaggacatacccacagtgaggatttgtgtgccaggcgtgtcatttctctgtctcctccagaccccccgccctcatgatactgttgccaaaatcaagggcccaaccccttaccccttaaacatctttgccttttaaattttgtaaacaatgctggaataaaacatttttattataacagatacaagtaatagagatgttgtagcaaagtctgaaggtctctgttttaagtagtgtgtaatagaaaaccaaaataaggggtgggcgaggtggcttgcgcctgtaatcccagcattttgggaggctgaagagggcggatcatgaggtcaaaagattgagaccatcctggctaacacggtgaaactccgtttctactaaaaatacaaaaaattagctgggcatggtggtgggcacctgtagtcccagctacttgggaggctgaggcaggagaatggcgtgaacccaggaggaggagcttgcagtgagctgagatcacgccactgcactccagcctgggcgacagagtgagactccgtctcaaaaacaaaaacaaaaacaaaaattagctggacgtggtggtgggtgcatgtaatcctagctacttgggaggctgaggcaggagaattacttgaacccaggaggcggaggttgcagtgagctgagattgtgccaccgcactgcagcctggcaacagagcgagactctgtctcagaaacaagaaaatcaaaataacagtggcttaaaatgggagttttagtttcttttacaaaaaggaacagattcagcctcttgtgttagcttcctgaggtcaacagagacaaggcttctcctgtctttctgtatcaacatctttagctgtggctttcattttctaagacacttcatgatataaggctggagttccagtcatatcatccaagttttaagcaggaaggaagaagaaggggagaggaaaagaaaaagcacatgctagctagttgtccgtcccatttttatgcagggacttatttgtttacattgctcagcactagccagtcatgtgctaaagccagctcaccctaggttatgaatgccaattgttacatttgccagagtttttgcaagccgattgtcttgagtttggtagcttgaaattggccatagtttttacacaagagaaaatggtgtaagagagagctgtttgttaaccatttacgagacacagctgttcctggctgtaggacaggcgaggaaatgtaatttttaacttggtgcattgccacacagaataaaatcacagtccttttactaaagaagaagggaaagtgataatgaataagaaaacactctttgctacattctccccactttgtattccacagactggatctgcttcccctgtttaggttgttaactcttgtctccttttcaagttatgcaacagtcaacatagttttacatttgtgtttctgcacatgaaccagcatttgtggacaatagcttctttgaggtagatttgctaggtcaaagggtatgtgccctctgcttaactctttataaagaacactcaccagatgtctggtctgtttcctcctaatgtagtgtagtggtgatgagcatggattttggaatcacacatacagggtgtgaacactcattcagacacttctagctgtgtgactttggccagcttacttaacctctgtaagtgtcaatgtttttttccatgtaaaatgggagtgggggataccatctgaccctgcagggttttgtgacgatgaaatgagattgtgactacatagcacttacagcagagcctggcaggttgtaaacccacagtaaatagttagcaggggcttctgctcatggaaagatacacatgtgtgcaacatacagtgagaagaatgaaaacatgaaactgggccttgaacattacatgtagggtcgatatgagttgtagagatgaccagattcagataggaaagcaatggatgtttaatgttcaaactggaaaattattcatttcactgcccctaggggtaggtgtgtaagctaattgatggttagaaaaatcccagagtaaaccaggaatgtctctaattcataagtgtatattataaatatatttaaaatcatctttatgacaattcagttatgtttctttagcatatcagatcctttagttgtggaacttgacagaaatcaacataaatgttctttttctctcccaactatattgaacattgcacagatgtgtagttatttatcatgaacatgcaaatattgatgtccccaaggcccattctttgaatttcaaactgctgttgctatatttggatgttgattaatacgagtctttgctctgacacatagcatgtctgatttcaggacctctgaaagcagcatagagaagaaaagagaagctgaggcttgatattcatagggatggacaataattgaagacgtgaattgctttgggaaaatggcagcaggcaaccaaatatacgagatggttaaggatatgcctagcacagaactttgagcaggtagattttcagtatatctttgctcacttaaagagacagaagctatggagaagaaacaatcacaatgaaagaattattttaacactagtctagaacaagatttcttaatcttggccctattgacatttttggctggataattctgtgttgtgggggccgtcctgtgcattgtagggtattgagccacatccttggctacccactagatgccagttgcatggccttcctcaagttatgatcacaaaaaatgtctccagaccttgctaaatgtctctgggtggagggcagattcactcccagttgagaactactgatctagaagaaaggaaaattagatgatataaagtaaacaacaattatatgctagacatttaacccattgagtccttgcaacaagcctgaattgcagatgttgctaaaattatttttgtggaaagagaggtgggattccaagaagctaagaacatgaccccaggtgggacagatgggatctgagtccaaatgtgatgttcttttccttgtattcctctccttcctaactgtatgacataaacgtaaagtatcacaagagcttatgctgctcctcttcttggtaccaagctcggccttcactttcttatgaaaaccaaaagcagttttcaaagaatcatgcacaacttatatttgggtgattgatctgatttggcatacattttgtggagaacgtgaaccagtctattccccagtggagggctgttgataaacaaagagatatgtagtctttttagcatttcaagggctgtgagtctcctgagaaaactcaaaccaggtccaagaggagttactttgagacaagctatctaagaactgcaatatcctctgtggggaaggtggctttcgttgtaatggttcttgcaaatatttcttaaaccaaatagggttttcttctggggaacactgagatcaactatttgcctatttgatcctcttgcagttaatgtaacaggtttaaaactctggtctcagcagaaggggcttcattccgagctatgggggctaattctgtgcagtgcagtgtggggacagagcatcccactttccacagtttggtgaggcactggcccttagaggagagtttttgggtatacagctaattgttctaattatgtagtagtaaaaatcataccgtcctgtagccgcatatgaatagtgcactagagtgctttcttaaaagagttgggatggggttgggagggtcaggaaatgaagggataaaattattgttaattccacccccttgttataccatcaagagaatagaaaccaataaaagaactaaatgttggcaatccataaaattccataagcagtaataaacaaaagctgaaactgtattgatatacaaccaaacaaggaaattatcattattttttaataaagccatttatcatcaataaataccaaggggaataggaaaaattacaagcacaatgccatcttccataattatacctattaacaatttaaagcataattatgtgagggagaaaaacttttaggaaagctttgtgctgttttctccacagaaaagtcaaattctcacactcccagatattcaggattttctaaacatttcagaatgattggttatgcttgtcccaacttacagtagcttattttctaaggatctttctaataattcaggcccttccggcctctccattaccaggtttgtcatcagccctggagaaagggctgggattcaggaaaaaggtatatatggtaatgatctgaccgcttgctaaatgtcactggtcaagaggactttgtttagtgacaagttgattttgggattccaggatctttttttttttttttttttttgagatggagtctcactctgttgcccaggctggagtgcagtggtgctatctcggctcactgcaagctctgcctcccaggttcacgccattctcctgcctcagcctcttgagtagctgggactgcaggtgcccgccaccacgcccggctaattttttgtatttttagtagagatggggtttcactgtgttagtcaggatggtctccatctcctgacctcgtgatcccccgcctcggcctctcaaagtgctgcgggcgtgagccaccttgcccggccccaggatcttacttattttatctgaactaaccccagctgagcagctgctattgcctaaatgactatgttccaggccttggggttacagaaataaatgaggtactggtgtttgtttgtttgtttgtttgtttgagatggagtctcactctgtcacccaggctggagtgcagtggtgcaatcttggctaactgcaacctccgcctcccgggttcaagtgattcccctgcctcagcctcctgagtagctgggattacaggtgcgtcccaccatgcctggctaatttttgtatttttagtagagatggggtttcaccatgatgtccaggctggtctcgatctgctgacctcatgatccacccatcttggcctcccaaagtgctgggattacaggtgtgagccaccgtgcctggctggtgtatttttttaaccattgaacaccttacattcccaaagggaaacagacctgtatgcctgcagtggcgaacagcagggtgatttaagagtatgcctcagagcccaccagccagcctggggtcatagccctgctctgaagcttatcacttatgggaacttgtacaaattaattaatgttcatatgcctctgtgtccttatccacaaaagaaaaaatagtaataatatctgcttgtaggttgttatgaggactaaatgagttgatatatgaaaagtgcttaaaaaactgcctggcacctggtgagtgctatgtaagttggcagtcatttaacctgacagggtgaagtcctgtgacttggtactttggttctggtatgatagcagtggttggggtattttgatagtttgggtctggtgcaatagcaagctcgtggtcacggaaggctctgtgtacaagagaatgactgtcctgagtcttaaagggtgagaataataggagagagtattccacacagggaaaaccacaggagcaaagggatagcatacagaaacagtatgatgtgcctggctctttataagctatactccatcttcttagagcctgacacaattgagctggtggcagagagagagaggaggctgcagtagctggcagagtctggtcacagaggcttgagtttttcttgaggacaggagggccctgttgaaggatattcactgtgaaggtgatggttagtcagatttccagtctagatccattaggaaagcagtgtactgggttgctctaacaagtgagaggggagccgaagggaagggttaggggcaacttttggaatttttatgattcagacttctacccagtaggacaatatttcagcagggttatgcatgtttgttggaaatgaacacctggactgattgattctcagtttaattgtggtagtcattagtgctgtttggcaaatatcccagttctccactttcaggcacatgtataaacaaatggtaggattgtattttctggtccccttgtgtgaatggggtcacatgaatagttcaggtccaggagttgtaagaaaagtgatatgttactttgtaatcatatcactgagttgttgctgaaagatctttcagagcttgctcttttccctctgtcacagtgactagcatcgttccagatagagttggctccatcagctgggtcctgcagtacagatgacatggagcagaactcccagctgactcttgattaacatggagcaggagtgagaaataaaccgttatggtttttaagccaggggtcagcacactttttctataaagggccagatagaaaatattttaggcttttagtttatggaccatgcagtctctgtcacaactcctcaactctgtccccatagtgggaaaacggccataggaaatatgtgcacacatgggcatggctatgttccaatcaacttttgtttacacaaacaggcagcaggctgcagttgaccagcaggctgactcctacttaaggcactatggtttgggggctatttgttaccaccacataatcaagctattcctgactgatactttgcccaactagcttttctttttaaatacaggtaaaatttacatagagtgaaatgcacagatcttatgtgtgttattcaatgatgtttataaatgatgctatgtgatgtttaataaatatatacatattaagtatatgctttattatgtatcataaaactatcccattttatgaatatagaattcattttcttgttgatggaaatttggactatttatagcttttggtcattatggataaagctatgagcattcatgtgaaaatctgtgtagatctagatttttatttctcttggataaatagctaggagtataactgccagatcctggagggggtgggtagatgtaggtttaaatttatgaaaactggccaacagtttttcactgtgattgtgccatttatacttccaccaggaatgtttgagagttctacctactctacatcctctccaacagttagtgtcgtcagtcttttgactatatttattctattaggtatgaaatggtatctcactgtagttttactctgtgtcttcctgatcactaatgatgctgaatgtattttcatgagtttactgccatttgtatatcaacttttgtaaacagactgttcaagtattttgaccatttaaaaaattgatttctggtcctaagtcctttgtcagatatctatatatctacatcctatgtctatatttatttatttcaaatttttcttccagtttttgagttgccctttcacttcttaaatggtgccttttgataagcagaaggttttattttgataaatacctatttatcattttttttttttgttaatgctttctgtatcctaagaaacctttgccttccttggggttgtgagatattctctatttctttttattaccttgagttttggcttttatgtttaggtctttgatccatgttgaattaattctcgtgtaggagagttaagaattgggattctggctgggcacagtggctcacacctgtaatcccagcactttgggaggctgaggcaggtggatcacgaggtcaggagttcgagaccagcctgaccaacatggtgaaaccctgtctctactaaaaatacaaaaattagctgggtatggtggtgcatgcctgtaatctcagttatgcagaaggctgaggcagaagaattgcttgaacctgggaggtggagttgcagtgagccgagattgcaccactgcactccagcatgggcgacagagcaagactctgtctcaaaaataaataaataaaataaaataaaagaagaaaaagaaaaagaattgagagtctgtgtgtatatctagttgtttcagccccatttattattttcaactacactcccccattcaattattttggaaactttatcaaaaatcagttggccatgaatgtgtgggtctattattgtgttatctgctctgttccattgacctatttttctacctttatgcaattaccacactgtcttgactactgtagctttatagtaaggatttaaattaaggagtatgagtcctccaaatttgtatttcttttgaagcatctttcacctgttctttgggtttccatataaactgaggtcctttgggtttccatataaattgagaaccaccctgtcaattaaaaaagcctgtggggttttgattgggattttattgactctatgaatttgtggaatgttgatatcttaagtttttcaatccataaatgtattacatctttccatgtattcaggtgttttgtgtttttttagtggaggtcttgtacaactttagttacttttattattactttgtttctgatgctattataaattgaattaaaaaaatcattttccagttctttgcttctagtacatagcaatattgatttttgtatattaactttgtatctagcaaccttgctaaagtcacttactacttctagtatttggtttttaaattcatcaggaggttttatgtaagctattacattgtctagaaataaaaagttacttcttcccaattttatgtatttttttcttgttcttgtcttattgccctggccagaggttccagtacaatgatgaacagaagaggtgagaacagacatctttgcctcattcttagtattagaaggaaagtttttattattttatcatatgtattatctttgatgtagaagttcttacatgccttttatcaacttgaggaagttcccttatattcctagtttatcatgaatgggtattgactttttctgatgcttttcagcctctattgattatatgggttttctcctttgttctgttattaataatatggtaaaagcaatttgttgattttcaaatgttaaactcaccttgcagtactcagatgagcatcacttggtcatcatgtgttatcctttttgtatatttctggatacaatttgataattgttattattttttgagatagagtttcacttttgtctcccaggctggagtgcagtggtgtgaactcggctcactgcaacctctgcctcccgggttcaagcgattctcctgcctcagcctcccagttagctgagattacaagtgcctgccaccacgcctggctaattatagtatttttagtagagatggggtttcgccatgttggccaggcttctgttgacctcaggtgatccacccgccttggcctcccaaagtgctgggattacaggcatgagccactgtgcccagtcaatttgataatattttgttaaggattttttagtctatgttcatgataaaaaattgtggtaattttcttttcttgtaatatttttgtaagatttagggataagggttatctactggcctcaagatgaattggaaagtgttccttcctcctctgtgctctgaaagagtttgtgtaattttgggttttttttcttaagtttttgatagaattcaccaatgaaaccctttgggcctgtcagttttctttgtagaaggttttaaaaattattataactttaatttaataaatatagggtgactgaaattttctatttcttcttgtgtcagttttgttaagttaatttttcaaggaatttgtttacctaaatttttgaatttattcgcatagaattatttatagtgttaccatattatctttttaatatctgtaggctctgccattataccatttttcatttctgaattgttattttagaatttttctcttaactaatcttgctagggggttgacaatatttttagcagctttatttgaggtacaatttgcattacataaaattattttaagcatgttcttcagtgatttttttaaaataaaatcatatagttatataaccattaccacaatccaatattagaagatttctgtcacccttaaaatcccttatgtccatttgccgtcactctctattcctacccccaactctagataaccaaaacaagttactgttacaattgatttgctttttctagacattccatacaaatgaaataatacaatatgtggtgttgtgtgtctggcttctttcgtttagcataatggttttgagattcattcgttttgtggcatgtatcagtattctgttcgcttttattgctccatagtgttttattgcatggatatagcacatttagtttgttcatttgtcagttgatgatgaacaatgctgccataaatattcacatataagtcttgtgttgacatatatttcacttcatttggatacatacctttgagtcaaattgctgctagactgaattctaaaatgactgcatcttacatttatgccatcagtatatgaagattccaatttctctacatccccccaacatttgttagtgagtatatatttttattttagccattctagtgcatgtgacagtgtatttcattgtagttttaatttgcatttttctaatgactaataatatagaacatttccatgtgctaattggctactcatatatctttttttcaaaaaacattcaaatcctttgccccttttaaaaattgaattctgtttttattactgagttacaagtgttccttgcatttttgtggatataattcctttataaagtacagtatataatttgtaaatattttctcccagcctgtgggttatcttttcatttttttatggtatgttttgatgtgcaaaagtttttaatattggcaaagtccaacttaaccactttttgcttttatagataatgcttttggtgttacatataagaaatccctgccgaggtcatgaagatttctctcctaagtttatcaatattattaatatttcaaaagaaccagcttttgcctttgttaattttctctattgttagtccaatttttatttcattgatttttcttctttttacttactttgctatttttctagcttgttaatatggaaacttgtgattttaagcttttcatgttttctaatataagcatttaaagctataattttttctcttaactataatttgcgctgcatccatggattatgctatgttgtgtttttattaatgtaacattaaaaatgttttaaacattttcttgtgatttctttttacatccctgatgttttagaagtgtatagtttaattttcaattatatgtgttttctagatatcttttttgtcaagttctgactttattctattgttgaccctgatctgatcactatatacattacatgttttgaagcatcactatgtgctccatgaatatgtaaaatggttgtcaattaaaaaaacttaaaaagaatttaatttagatatttattaggacttattttaattatcattatggcatatggtctatgttcatgaatacatcttgtgtacttgaaaatgtgcattgtgcaatttttggatatagtgttctaaaaatatcaattagattaatttattcagtagtgtgtccacatctacagtatctgtactggattttgttttattaagagtttctgtgagttctgagagaggcatgtttattctttatccacaggcatgtttattctttaaccacaattgtggatttatcaattttttcttttacctctgtctagtttttgtgtcatctgttttcaaactttgtatttaagtgcacacatatttatgattcgtatgtcttcctgattatcatcatgaaacaccatgtttaaacctctgatcatagtctctgcctcgaagcttactttgtccaatatcagtgtagccataccacttttttatgtgtactttttttgcagcctatatatgttttttatcctattactttcaacctaatttggtatttatattttaaatgcatccttgttgattgcatttagttggatcttggtgttttattcagtctgataatctttttctttttttttttcttttgaaatggagtcttgctctgtcacccaggctggagtgcagtggtgcaatctcggctcactgcaacctccgcctcccgggttcaagtgattctcctgcctcagcctcccaagtagctgagatcacaggtgtgtgttactattcctagctttgtgtgtgtgtgtgtgtgtgtgtgtgtgtgtgtgtgtgtgtgtttagtagagacggggtttcagcatgttgaccaggctagtcttgaactcctggcctcaagtgatccgctcaccttgatggagtttatgaaaactttttgatcagcatgttgtttttttcccaaattgaagggaatttttgtccgttatttgttcaaatactgtttttgccttattattctcaccccgattacacataaattagatcacttgatatgtttgcacatttgactgtaattctgttattttgttttaatcttttttctcctctcatttcttcagattggataaatattttgacttcttttcaagtattattgatctttcttcaagttgagtggtccttttttcccccttgacatttccatttgctgttaagaccatttatcaatttcttcttttacctctgtctagtttttgtgtcatctgttttcaaactttgtatttaagtgcacacatatttatgatttgtatgtcttcctgattatcatcatgaaacaccatgtttaaacctctgatcatagtctctgccttgaagcttactttgtccaatatcagttgtagccataccacttttttatgtgtactttttttgcagcatatatatatattttatcctattactttcaacctaatttggtatttatattttaaatgcatccttgttgattgcatttagttggatcttggtgttttattcagtctgataatctttttcttttttttttttcttttgaaatggagtcttgctctgtcacccaggctggagtgcagtggtgcaatctcggctcactcaaacctccgcctcccgcgttcaagtgattcttcaagtgaatttttcatttcaaatattttacctttcaattacagaattttgtttgatgcttttttgtagtttcaaattttctgctgatattcccctattatgactctctttccttgaggttcttgaaaatatttattataacttttttaaagttcttgattcctcattcaaacatttgggttatctcaaaatctgtttctgttgcctgatttttcttttgactgtgagtcacatttttatgtttctttgtatatgtagcattttccattgcgttaatatgttgcaaggattctgaattctgttatctccccctgaaaagttaagacttctgttctagattaatttttgcacctactggctgactaccttgaacttgggaaagtttgtttgtacactttgttagggaagctctgtttcaattttgcaattgatcttagtgtaaatttgtaatcctaaggcatacctgcactttaaggtgtcttccttcaggagttttcatgcaaagcttaaaatatttaccaagcgccttcaccatgtcagaattaaaactccagaccctgactttttaatgatggacagcttatgaaatatttggtagctttttcagcctttcacctgtttgtttctgccagactacttggacttccctcaagcatctactgttcagggataagcccaggatttgtgaggagatgtatgcagatttcctccctctgtcacctgttctgttctggtatttcccttcacaatctccaaccgctttggcatccctgacatctggcttttcaaggcagtgagactgaagctttttcttgagttctggctgctgtgtccagtgcagactctggagtggcctcaaggggaaaagccatttaaacatagatatcacccaatatggttctcttctttcaaggccattggattgtcttctgtttctgtctgcttttggtagctttccagtgccttctattagttgtttatatttttccaagagtttataatttttaactctttatgcatctgcctcctacatgagggtctagggaagagatctccaggtggaggaaagagcaaatgagaagccctgagcaggactgagatgaatgagctggggtggaagctggaggcccatgggctggaatgaagtttacatccagggatccctctaagccattgaacttcggcatttgctctgagtgagagataaggagctgtcgaatggcttccttagagaaaaaatgttatctaattttttgccttgtactctaggaaggcaagagaagaagcaggtagaccagttaggaggcagttatgactggtaagagatgatgatgattgatctgggtcaaacaaaatgatttgttgagagcttcgtatgtgctgtgtatgatgctacccacctaagctaagcagctgtgttcccaatctccttcttgccttggcaggggacacagcttgaggactctcttgctacatagaaaaacacatgaggctgagcatggtggctcatgcctgtaatcccaacacaggcatgctgaggcaggaggacttcttgagctcagaagttcaagatcagcctgggcaacacagggagaccccatttctacaaaaaatttaaaaaattagccacatatggtggcgtgtacctgcgatcctagctactgaggagcctgaggtgggaggataacttgaacctgggaggtttaagctgcattgagctgtaattgtgccactgtacttcattctgggcaacagagagagaccctatctctaaacacacacacacgcgcacacacacacacacacacacacacacacacaatagggaaggaaacttgattaaggaaggccggtctagcataaagctttgggtgaaggatttacttgtgtgtgcatatagccacatacctagctgtgtaagtcattacaaatgtcacctggctaatgttcattaatgattagctaattataaagctgccgttctgtccttggactgatagctggtttgttttacagaaggcagtatctttggtagagttgctttatcatatcaaaaagggtagtgttgttttttttttcttagcaatagcttcaagaacgaagaagattaaacaaacactatcgaatgaaagaaccaagcccagtacctggcacataataagtgcgtagaaagcattacttgaaattagatttactgcttttttgattaaaaaatactcttccaatttaatgtcttaagggttctctataaagagtacaaattataagttaaataaacactatattggaccaaaatcagaagtagaaacttgcataccttctcttgatttgttaattactgagaagttatttgtggtcttgacctgatgcatgcattaatacattatgtgtgtgtgtgtgtgtgtgtgtatatatatatatatatatttttttttttttcttagctccctttacttctaccttctctctttcactctctccttcctcccattcctcctatcatttattgaggactaaccaaatgttctagtcactgttctggcacttgacgtgcagagcctcctggtagccttcagtttagtgcagtgattgagagcacagcctgagagctggacccatttgcattccagcccagcctcagccccacaagctgtgtgatcagaggcattttaccaaacctttccaaggcttggtttacttatctgtcaaatgaagatggtggtgcagttttcaggctgcaagtgagtgtgtaaggtcacttagctcataatatggtgacacatttcacaggtctcatgatcagatgaggaagcacatagtatcattcggccttttatacaggtccactggttacctgttcttggtaacagggtgaaggctggggtaacaagtcctgccgggagactgtaagaggttgcatggcactgtgggtcagagtagcatggatccagaccgcctgcatgtacattctggctctgccacttattagctgtgtgccattgggcaaattatttaacctctctgtgtttcagtttcctcacctgtgagatgggttagtaatgctacctattgcatagaactgcagtgaggatgaaatgagttgacccatgcagagtccttagagcagtgactggcacttagtaagctgcatagaagtattgtctattaatacttgcattgattgtgaaacataatttagcattgctaagaggctgtcttttcaggagcatggagtccaagtgcccatttcctgtacatttggctcagatacccacccctaaccactgcacgcagtctcttttctgtctgagtgggacacatctctttcccctgcagcacaatcactctgcctcccgctccgtcctggtctgccatctgctgacccattcgctgctcctgtcacgtcaaagatagcgtggcctttgtggagtgcccaggcagcgtgtcatgtcccagcgctgttgtacatcttgtttcagagatattttgctgtaatgttctgtgaccttttccattgagtgaggtagttggaaaggcactcagtaagggaaaattgagctgttttattcctccccaaggaggctcctgtttcctttccaccattcatttgaaagctatcattttcttgattttatagctgaaaaacaccattgattcactgggtgttagatgctaagagttctcctattgacatgcctattgacagttttcagtatattctgcatctaattatcactcttggctaaatgatacaccttgtggacttgagcgatggagtcgatagctctcaccacattgttctagtgctgcctattgagcctggtgtcacggcgatgtgatttatgtgatcagaaagaaaattcctgttggtgtgctgcataattaaagcaagcgcagagtgactggtgacaaaaaatcaggcctgccgatgtcaccccaaatgaggagagatttctagagtaagcagctgtgacagtgaagaatctctcttggcatcttctgctttgcaattttcaagggttcgattttcctcctggccctggctgagggctcctcttctctcccttcctgctgcattgtggtcagagcttcagtacctgtgtgctgccattccgaggcctgggccgtggggcttgctctgggaggggctcattgttgcagacaggggctgttcatagaatttgggctggcagcagcccacatttgcaggtagggaagatagatggctctaaaatggcttgtcctttgtataagctgttttgagtttctgaggttgagattaaatgttgggaaggccattttccctgtgcatgagaggagtggtccctgcgttgacatggcgggttctgagaggagttgatggtggtgatgctggccagccttaggcaggactgaagtgcaggtggctgacaggtggcaaagactgggcatgtagtaagcaaacaaccctggtgtgagacagtgttccctgtgaatcccaccttctgcctcaactactcctttaccaacactcttcccagagggtcttcagaagatccgcgcagtcaaggaccttgccttcttcaatgctggtgtggcgatgattttctgtgaggccagagtcaagtgatctagcctccatagactagtgtgttctccatatctgaagtgaacggggttccttttagccctaaagtactgtggcttagtgagttggggcttggaataagggttggagaaagtaatggtgttcatctgagaggtcccctgaaggaattcaaaggccaagctgccactgcctgagaggagtgcttcgtgtgtgctgctgatctaagatgtggagcctctggcttcgtatggcactgaaggaaccttggaggttagaatatgttagcgagatatttaatgagacatatgaacagaacatctgaatcaagccaacagagtagacatttccaggcacctgagttgggcaatgaatttggcctggtggctagcaaaagtcatgagtagaatggggattgggtgttggtgggtggtttgggccatgcaaaggagtcaggattctgagattttgggtagctgagattgtgacaagagggacttttgaggtcagtgattctagatgggttactttcctggaagccatatgccttgtgtgggcactattactatcaatttctacttaatgaacctctgtatgtggcacttttggggttcagtttttccccatgcacaaggccagagagattttgtgacttgagttcccgttttcatcattgggattttttaatataaaagttttgagactactcagtgttgtatttttgaggatatactgatactttataattaggggttgtgttaggccattcttgccttgctctagagaaatacctgagactgggtaacataagaaaagaggtttaattggctcatggttctgcaggctgtacaagcatgacatctgacatctgcttggcttctagcgaggcctcagggagcttttactcatggcaggaggcgaagtgggagcagcgatgtcccatggcaaaagcagggaaagacagagaggcaggggggtaccacacacttaaaccacctgatctcatgataactcttactcacttttgagaggacagaactaagctgtgagggatccacgcctatgacccaaacacctcccaccaggccccacctccaacactggggattgtaattcaacatgagatttggatggggacaaatatccaaactatatcaagggcccatagtgctttgtcttcgacactgagtgaaccatggaatgcgtcagcattcttgagaattcatatctcttgtactttgctttagttgttcatgtttatttatctggactagttctgaaattgtcaatgattctgggtaaggagagatattcctctgtaactgtgaaggacctttgaacattctgataggattaatgattttcttccagtgtgtctgtaataatcactaaacatgtctctgtgaagactccttagtacattaaagtattgttaatgcaacagtaccaccagaagactctgggtgattgatcgggataaagttgatcatctgtctgttaaagttcttttttttttttttccattcttgacaagtggttcaacttagaaatcccgagtaccccttacaaattgcaggctacctcaatcacctgtgattacagaacatggttggtttgctgtgtgctaggacccccatgtcttaaccacagttgatttattttaaacactggaaattgcaaaaaaaaaaaaaaaaaaccacacacaaaaaaacctaccttgggagttctttgaccccacagttcttcctattctatgtcttaggctcttaaagtgcttctcctttctgcatctgtctttccccaattcagaaggtacttcccgctggcagaggcatcactcagtaaatttcagggtagcataagaattgctctggttacgttgatatataatttaattttccccagactgcctctggcctctgcctgtttaagctctggaatccctgtggggggtgagtgtgcagaatatgttctcacctctcaattcattgtgactttagctggaggtcggtcctgttgctgttgttgctctgcatcccagcaagtagaagcagcatgtgagatggagtgagcagtaggcatatggccagggtttgtgtgtacagagggatgcagcacagggagggaaagcagcattttccctatgggactgtcaagagaagtcgagcccttccatggagcacagaggcacagagaatcagacagggcatgggcctgggcagcctgaggcctgcctggtgagcgatggggcaggatggctcacatcgcctagccgttggcaaagggtctaaaattcagtgcttcccccaagcagcctagctccttcaaatggcaaattattatttttctgttcttttctgtcttcgggattgtatttgcatctcaaatgtgtgtaaagggaattttgcacattcgacaaacttttactttaaaggcagcaggttggagaaaggagctccatcacattaaatgctggctattgtgcttttcattcagcttgacgaacagtggccgaaaatggcaggggattaaactgatgtaatgacaagaattcatataagaggctgtgggaatggggcagaagaatgctgaggctttgcagtattatggtgttctttgatctgccgtagatggaaaacataatgtacctgtatttatgttgattctaaatagggagtgtgtaaacagaggcatgtcattttccctgcagccttcaagttgaaattacacagctaccatttctgagcaatggacatatttctgagtaatgagttaaatgcagtttttgaatatttggatcttattgtacatcacaataagagcatttttgttgctcaattgggttcctgttacagaggcacacagtatgtgggcatttgtggattattcatttgctaaagggcattcttcttatttttaggaaaattcacctttgtcttggggaatttaagcaaaaacaactgcaatcccgaatagaatgaacacctccttttttcagcctcattctttagtgtgggagagccgcagatgagatgtccctgccttctggagaaatacatatgtgtctttcatctgggaaatgtctttctgggacagcaccagctggaagatgtcacctgggatgaccaaagacttgatcaattgacaaggggagcatcaaaagtggctgagaaccatttatgtttactgtgtttgaaagcactttggagggcagggcgtgcgtctcgtgcatctgtataatatgaaagcatgttttgtgaggcacatcttaacatatggttccagaaaaaggaaggtggtgccctgcactcaaactttttcttttctatacatagctagaaagtcatctttctataatcatttgaataatgatgttcacactttttttgttgttgttgagatggagtctcactccgttgccaggctggagtgcagtggcgtgatctcagttcactgtaacttccgactccttggttcaagtaattctcctccctcagcctcctgagtagctgggattataggcatgcaccaccatgcgcagctaatttttatatttttggtagagacagggtttcaccatgttggccaggatggtcttgatctcctgacctcatgatccgcccacctcggcctcccaaagtgctgggattacaggcatgagccactatgcctggcctgatggtcatactttttaaaggcttcatgaggaatttccctaatttcttagaatactgctttggtcatctccacaattatggtaggaaaatgtggactcaaggccatccacagttttgactgactctgctctgcacagaagcccctgggccagaatgtctcacctgccattagttcccatcccagcctcacatttgtgcctctatggaggctgtgccttctactagaggggcccacccttgctggcttctgcccactagctgctgcccatcctctgggggtcagcttgttccagctcccccaccaccttccctgcaggcttcatagccacctccccagagctgagtgtgtcctgtcagtagcactcggggaggatcagccaccttgctgccaggtggcctctgcatctcacctgttgcactcttagcgtcagtgatggagggtaataacactaatgataatggtaataataaaatcatttattcagcctgcttttactgattgcctgttgtttgctacgggtgaggatggagtggtcatcaaaaagcagacatgggccaggtgcagtggctcatgcctgtaatcccagcactttgtgaggctgaggcaggcagatcacctgaggtcaggagttcgagaccagctgatcaacatagtgaaaccctgtctctactaaaagtacaaaaattagccaggcgtggtggtgtgcacctgtaatcccagctactcgggaggctgaggcaggagaatcgccttgaacccaggaggtggaggttgcagtgagcctaggttgtgccactgcactccagcctgggtgacagaatgagactctgtttcaaaaacaaaaacaaaaaaagacagacatggaccctggattcatggcacttcatgttccagtgggaaggatagaccaaccagtagtcactcacgtcagtggaaggatgttgactgacaggtggtgcgtgacactgtgagggcttgcaaaggggcatgtgaaccattcaggaggtcagcgaaggctttcctgaggacagaaccagctacataattttcagagtccaatgctaaatgaaaatgcagaggtccttgtttaaaagttattgagaattttatggtgagtggtggcagcagggtattaaatcaactgtggggtccttctgtgcagggggccttgtgtggctatgctggttgcattctcatgaagcgggccctgcctgaggagtgacatttgagctgagatgtgaggggagaagagggtaggaagatggctccaggtggacgaaacagcatgagcagagtctctggcaggaaggaggttggcacattcagaaatgatgaaggggccagcgtagctggagttcagagagcaggtggggcatgacgaggccagggcagtagagttggtgatagggaaggcaaagcagaaccctacacagctacttaagtgtcctgagcagggagctaaagacactgggtttggattttgcagtcacactggctgcagtgtgcagggcagactgggtaggtagcaggagcgaaagcagggctgttcggaggatgtcagagctgtccagttgagggagggcaggggctagtccagagtggtgccagtggagggagaaggtgtgcaggaatattgaggacacccaatattgggcatagtggagctgaaggaacaaaagacgccaaagatgacatctagattctggctttgaacccctgagttgaacctcatgaaatcaccaacattctgccacttttgatctgcagaaataccaatttcacacaacttgttctgatagatgggtggttggtgggacatccctttacacgggaatgcttagaggatcagaggggtttgctttgtttttgctttggtggtggcagctatgagagacaattacaaactgggttctagacacagtgagcttgaggtgcctttgcaacctctaagtgagggtaaggaaagaggtggactatatgcatctggagcttagaggaggtgcctgagcaggagatacagttgttggagcagatgctgtatagacaccttatcagggttaccctgtttaaaacttgcaaacatcctgtaaagaatgtactattgtattcagtttccagatgagaataatatggctaagagaggttaattaacttgcccaaggtcacacagccaccaagtggaggagctgggtccagggcccaagctcctaattactgtgcctactgccttctcagtggtttcctcacatcaggatgcacagctctttgtactgagtagatccttaggaattccttattggataaatacatttaaaatatttggtggaaataatgatatcttcccttcttaataggagattcttgaaagaggtcccaaggccccaaagtgtcagcaaccatagatggaatttacatggttgcctgtctggttattctcatcacactttcctctccttcatgggcaagctccacccccaccccttgctgaggtctgaactttgtagagagcctcagttgtggtcatagcaacatcttgcagatgaatccattaatgataagttaggctcctcctctagtattcttggggtgaattttataggattttgacattttagggctaacagctgcctcaggtgctgctgcgctccctcgggaacccctagggcacattactaaatcttgctgggcctaggcacggactcaggatccttctcaacatggtactcatctcattttaggactgagggcactgagatccagagagatgttacttcaacaatcagttaatgctagaataaatctgtttgcttattaaatcaaataaagtagattctagttcagtccttttacaggtaaggatgctgagggcccgagaggcagtgacttgctcatttctggtggagatggagctcatgctcccattcctacctcccatctagtcagtggtccctccttgggcctggaacacacggcaaatccacttgctgtgttggctcattcagcaaaacggagcacatcttgttgtggacatgcatttttcatcagctgttcctctggaacttccctcatcatgcttgtggacagtgaattgaatgatgtgaattatactttattaggattgccttttgatacaagtatttcttttaggctgctttgtgcccgctgtgatgcccaccctggattttcttccctttgcccttgacgttgaagtgaaacatattgtttccctttagaatgccattaaaagtcgatgatgacctttacagtgactaatagtttctaaggggctttaattgtgattttttttttttttttttttttttttttttagcagagcggcattagtttgcttcatatgtcttttgtatcagggaatcaataaaaactcctgccttttgttgatgctataggatattttatgccgatgacaagggatttgatttaatattctctttaaataagatcaacactgctgcagttataaactcttcgaaaaactgtcaagcccgtcaatgtagcatgaaacaaaaagttagcagcctggtataaattagcacgtacaatgtgtctttgggaagggtggtacatatttacgattgtgtgttaaaatatatatatttagagatttctttctgctctttcgaccataagtgggaaatgcagagaggaacatttcattaccaccaccttccaaaccgcaaactttctttgccagttaatgattttctggggcaattctgaacgtggtgacatgatataaacaggtatttatgatctgtgatacaattcttcgtgagtatggatttatagttaaatggtgcagtgggaatccagccagagattattgacagagcttctagaatccatattttgtctgtttccattattcacatacattttcttttgagttctgattatctgtgtagtctgtgtttcctggtttacttgagaggtgagcataagactttgaaattcaagggcatgtgttctatatgcttgggggccatatgttctgtacatcttgaccctgcacctcttccccaatatcttgccattttcattcaacagcgattaggttatgtgattagatcattccatctctctttggctttgtcccagatgaaccaaagtaggagcagagctgatggacaagaaatgtttggggtgagcacatgggtacagtcgtggcagtgtcagagacctgggagagtccagagcttcctagatgagagttacacggctcctgggacaaagtgaggctttttcagaacagcagcagacaagtgagggatcactcacgggcaatgtggatcatgttagcaggataggaatggataggcaagagtctgaggggcggcaaatctgagatcaggtgatccagagagaaggtctgccttgcacactgggaagattgcagtggagctgctggtggcatcaggagagccctgggaggtcactgcttccatgactggaggaggtccactcagagttgcttccagtgccgacccacggggagaaactaccagaccagagtttcttgaagtatcttccctggagggtctacatcttaatcacttgggatttccatcagaatctgttgtgaggaagctgagaatctgtattttataaagctccccagctgatttccatgcaaaccaataaagctttgaaccatcgcttcacacttaaggagtctttccaagttagaacaaacttaggtctcctttcattttttccgaaagagtttgggtttatatctggagagagagtgatgctctttggacgacgtgggacagatacgcgttactccacaggtccatttgagaaagtgatatttgccagaaaatatacaatatatgttttgtttaggttatatttgttgtattatagatacaactttacatgcagtttcagatatccaaattccctgatcgtgaactccctgttgaaagctcttggttggaagacagggttatattaattcttgctacctttcactgattaccctatgcttgctctaaccatttgtgttgaagacaggatcaagatatgacctctagttactgtcctagaaaaatctctgctgggtcaaaatgctgaatcttcattatgctaataaacaccttgatgaaaatcgaagcatgtggtccccattccagccaataaatccatttgtcactattggaaagcattgtaattcttgaattcccatttctgctttcatttgaatgtttgccattcttccttttgccttagtcctacatatgtgaaccatttaggaatatgatttatgcaggaggaagagtgaagaggttccttctggacactgggcccttgaacttgaagatcctgcttttctgtctggaagacatggccctaatatgcagtggctcaccaaagcaggtattgatcttgttttcttgagaattcttcataggcatgagtcactagccagaccacacatcagctgtcatctgcccaacatttttgtcattttggaggagatgagtgcaaactgagaaagtctctctgcttgtttccctgggtggtacttatgctgtctgaatgttcctttctggaatttattagttagtgattttcttttcaataaacacttgtagcatacatactagtgtgctctcctaaagggggaaataatttggcagccttatcagcatgttattggactttcgttttgtttgtaatcttaagacacctttttcccactcagccattcagcaacattttcccttccccagccttggccccgccacctgaaacattcatgttcttcctctaagacagaataccaaccaagtgcaggcagccggttgacacaaccagatcaaaaggctttgaattctgaaaatgattcccctcttggtatcaagcccagtgataaaagcaaagcagttgtcatcttgaaaacagagctgtatacacagcagagcctttccaattagcacacttaagatgcgtgttagaaatgatgggaagtgggatgttacagagtgaaatgcaggtaatagggctttaaattttcatgtttcagttgatttttttctattgcagttttaagaaaatcgttgcacattattgaaactcctaagtgcatcttaccattgctcttctgtttacaataatatcttccaaaacaacagaaatgttggtcacaaaaaagcttgtacccattggttttccaagtagaggaagaataatctattattcaaaatttccctaccatggatgaacaaatcagtttaggtggcttttctgcctgctaccagccaactacttcaatggaatccctgaactgaacaacctggcatttttcatgttcactagactcaggcttagaaatggagcctcctcacaggatccacacaggcatatggagaaattaaagccaaatgtccagcaaaaaccaatgggtgtgttacataaagataccagagttatttaaatatgtaacttactcaccagtatgtaggctgctagaagtcaggggaaacctattaattttgaatctctggtgtctagcatggggcagcatagagtaataattacagttgtggtggatgtgattagtactcaccaatatttccagttcccctctccttttgtgtacatgggagaattatgctttcctttcctcttgaagtgagatgtgccttgctttggtcaaatcagtgggagcagaagtgatttgtgtcacttctaggtataagcatttaagacctagtaaatggcccttctgttatggtaaaccctaaagccttttattgagaaaggagcattataaaatgttggagactctgttagtttaggtcagtgaataactacagtcaccagagcccctttccaccagccaacccacactggacatgtagaatgagagagaattaaccttttgttagtttaagccactgagatttgggacttgttattgcagccaaaataatctaacatattttggctgatatactaatgaacatttattcagtgctgtgtgcttcaagtatttttatgtattaattcacttaatcatctctataatcctgtgaaaaagatactgctgttatcaccattttgcaggagaagtcacatgggtgatgagatgtttagtcacttgcccaagattgtatctctagtaaggagcagaactgaaatttgaacctaggcagtctggtaaataataaatggtgaatgagaaagtcaagatcagagagtgctttgtgatttgctgcagctatgatctttcatgtgacatcattggaggaggtaccggtcagtgtcatctatcccagatctctctgctacctgtcatttttccattatggtttcttacttttaggtcttgaaagttttcggctttctatctgcctatataattcacatagtgctatggtggacaacactctgtaatggtttttggaaagctaggtactccacaagagtgcatgaagcgtcagagaggaggtctagaactctgggagagctaaggagcaatcaaggactagagctgccctttggctgagggttccttcattaagactagtgactgccatgttgtgctgtgagcccagagaagacgagcatcctgtgggagttcccacctgtggagttcatccagcctttccaagcagtagtgggagataggatgactgtgggtatgctcaactgtttgttgcttccaaaagaagatgagggccaatttcccaaaagggtaaaaggaaagaagttgtggcatagtctgagaggctcaagaggtttgattttgctcctttgttctaatatggtttggtcaaggtggtttggtgaagctttagggaacttcttattgtaagtaacagaagcccattcaatgttgtttaagcaaaaagcaggatttgttaaaacaatgtaaaatatagggtcctcttatggatccccaatcctggatgtatagcgagtcctcatggaggactggaacaagaaattgggaagctctctggaggcacagctccctcttcaacttttggaggttatgcaaaacttctctcaattttctcagtacatttcagctcttctacctggttagtattctctgctgtcataggttcaagggcaaacatggccatgatatagtacctgagcttatggatcttcagttcaaataaccatgaaaaagtgattagaaactttaacttccaattcaacaaactgggaacagaaaatttgatccacgttgcatggtctactcctggcctcatcatcggtagtggtgggatcatatctgacatttgttcagcagcatatgttgattgcctaggatgtgacaatcactgggttatgtgctgaggatgtggaatatgaataaggcagtgcctctgtcttttagattctcctgctgcggaggggcatgtgaggccagaactcaacccaagggatccaattggacccatgcctaacagttagaaggagccacattttgttttaatataaggaggttttaatagctactattgtgagatggtgaactcaccgatgctgaaattatttcatctgagataggatgatcatctctgtaacaggatgttatctgaataattctctcctcttccagcagattagaccacatgacccttgttctttccaactctgtgattttaaaataaaccatgtgatacagtctgtagaaatgaagggggaaaatatgtgctagaagtggtcagaaaagtctctttagagtaatgaaaacttgaatttatccctgaagaaagagaaggcacatagacacaggagaaacaatatattcccagttggcatagtgaaatatgtaaagacacaaagacaatggatgtggtatgtataaaagagaagacacacatctactttgtgtctttaagaagctaaaggaaaataagcgtttgggagggtattggaatgatacaattaggaaagtggacctatagctatagtatcggagaaccagagggaacttgttttaggtagaatattatttgctgtaagagaacacccaagagaaagtgacttaagcagggaggatatttcattatctcacgtaagagtaagactgagttaaagaattaagggattgctccagcagatgacatcagggaccaagactctttccatcttttttctctgcccattttaccatcttggcttggtgcttacacttgtttcctcatagtcacagcctgagcatgatggttccatgaattgcaggtggacacaacaagatctggagaagtgagagggatgtgtctttctgtgcatccctttttatttgagatatcctttttcaaatgtcctccagaaaatgtctgtttgtgccccattggccatggttagtcacatacccacaccttagagttaggggagttagagaggaaggcaggctttgctagtaatgagggggtttgtggggtaagagttgtggggtcagccactagtggtattgctcccagccagctcttgcaggtcatcttgccccatcacttagtttcactgataaagataaatcataactgtcatatgtcaagtatctgttatacactgggaactctgcagtattttgtttttactcttggcagcaacttttccaggtagatcatgtcattctcacttactgatgaggagactgagtggtgtgtaggtgactcagatacttagtgcctagagagatgagatcttatttgaattttagaatcacagagtctcagttttgaaaaacgttttagcccagaactgccttcttctccagaggtgcccagccctaccttcaacatccctgcccagtggcaatggagccagcttttcaatatttgcagagacgaaagttttctgaccactggtccagtgttctttccaaaccggatcactggcagagcacagacctgtcatgggatagaggataactgctggttttcttctgtggttccacctccccacccctgggagggatcttttaagatactggctgctggcactagtgatgtcatggcaactgttattgcagggcacgttgaaatccattagcaggcattcaaggctcctcatgagtaaagtaggggcaatgtaaaaaagttagtttggcttccccaacttccttaatcccaagaccccgtgccaggtacttgtattttctatttgctaaatgttagttgaaacaaagggctgttttgttgggtttgtgtttccctgtggaaaagattactctaggcaaattttagaaaatgcttttaaaaagaatcttgtgtaagttgaaaacagagggaaagaaagtaaatgtcttgatggctttttattacaataaaaattgtagtgagagctctttcaattccctccctcctcccatctactaaacaaacctttgtctgtgggaggaggattatgtttaaacaagagagcaaggtgggaaagtggcattatttgagaagtcctagtgctgataagtttgtgatcagtgacttcttgagtacttgtcaagattaaagaggtgctttaaaagtaagaatttgctattggtggttgtgggaagggattacctatagatccaataggaaaccattttgagtctgtaatgtgaaatttggggagtagaggagggtaaaggaaacaaaattcaagcaatgaaaatatttctttttggtaggggaaatgcttctagagttcaattgctctcctcagatacctttaaaattgccttacctttttttgactatgataaaaggacctcttaggcatatgtgccaattatcagagattttccctgataatatgataaattttcatactccagtgaaatttggtgattggcaggtcattgggttggcagttgtggttctggtgatgtcctagatatgttggaacttgggataggtctctggaggacatgatgcaggtagccttctggtagtcaggaggaccccagctgtttctccacatggctcctaaaacaggcaagaaaatggtggatctagacctgtactgtcaaatatggtaactgctagtagccatatgtgactattgagcacttgaaaatatggcaaattgagatgtgccataagtgtaaaatacacaccaaagacgtagtagaaaaaaggatgtaaaatatctcatcagtaatcttttattttgacaagaggatgtaacaattctaaatatacatgcaccaaatactagagtgcccagaatcataaataatattagacctacaaaaagatgtagaaccaatacagtaataagggggacatcagtaatctactgacaacattagacagatcatcgaggcagaaaaacaacaaaccctggacttaaattggactttagaccaaatggacctaatggacatttacagacattctgccttacaaccacagaatctacattcttttcatctgctcatggtgcagtctcaaaaattgaccatatgctaggccacaaggcaagcctcaatacattttaaaaaattgaaataatgtcaagtaccgtctcagactagagtgaaatagaactagagatcaacaccaaaggaaccctcaaaactctacaaacatatggaaattaaataatctgatcatatgtgattgttgggtcaatgatgaaattaagtggaaaaaaacccaattttctgaaacacatgaaaatagagacataacataccaaaacctctgggatacagcaacggcagtgccaagaggcaagtttttaaaggattaaatgcctgcataaaaacatagaaagatctcaaattaacaacctaaccttatacctagaaaaacaagaacaaactagaaaaacaagaacaaaccacacccagagctagcagaagaaaagaaataacaaagatcagagcagaacaaaatgaaattaagaccaaaaaagccactcaaaggatcaatgtaatgaaaagttggttctttgaaaacataaataaaattaatagaccactaactaaattagcaaagaaaaaagaagagtcacataaacacaatcagaaaagttaaaggtgtcattacaaatggtataaccaaaatacaaaagatcaccagagactattgtgaccatctgtttatgtacaaactagaaaatctaaaggaaataaattactgaaaacatacaacctcccaaggttgaaccaggaagaaatagaaatcctgaacagaccaataatgagtagtgaaattaaataagtaataaaaaaccctctaacaacatcaaaaaaattccaggaccagatgggttcatagccgaattttaccagacatacaaggaagaactaataccaatctttactaaaactgttccaaaaattgaggaggagggaatccttccttactcattctatgaagccagcatcaccctgatactaaagccaggcaagcatacaacaaaaagagaaaactacagatcaatatcccagaagaacacagatgcaaaaatcctcaacagaacactagcaaactgaatccaatagcacataaaaaagatagtatactgtgatcaggtgggttttattccagggatgcaagattggttcaacacacacaaatcaatcattgtgattcactgcatgaacagaattgaaaacaaaaatcatatgatcatatcaatagatgcagaaaaagcattagataacatccagcatctcttcatgataaaacccttactggctgggcgtggtggctcacgcctgtaatcccagcactttgggaggctgagatgggtggatcacgaggtcaggagattgagaccatcctggctaacatggtgaaaccctatctgtactaaaaatacaaaaaattagctggacgtggtggtgggtgcctgtagtcccagctactcaggaggctgaggcaggagaatggtgggaacctgggaggcggagcttgcagtgagccgagatcacgccactgcactccagcctgggcgacagagagagactccatctcaaaaaacaaacaaacaaacaaacaaacaaaaaaaacccttaccaaactaggtatagaagggacatacctcaaaataataaaaaccatgtatgacaaacccagagccaacatgatactgaatggggaaaagttgaaagcattccttctaagaactggaacaagacaaggatgcccactgtcaccactctgattcaactggaagtcctagctacagcactcagtcaagagaaagaaataaaagtcatcttaattgggaaagtggaagtcaaattatctctgttcactgatgatataatattatacctagaaaaccataaaccctcctagaaaagactcctagacttcagtaaagttccaggatgcaaaatcaatgtacaaaaaccagtagcatttctgtacactggtaatgattaagctgagaagcaaatcaaagactgaatcccatttacagtggctaccaaaaaaacactgaagaatgcatctaatcaaggaggtgaaatatctccacaaagagaagtacaaaacactgaagaaagaaatcatagatgacacaaacaaatagaaaaacatcttgtgctcctggaatggaagaatcaatataattaaaattaccatactgcccaaagcaatctatagattcaacccaattcctgtcgaactaccaatgtcactattcgcagaatttaaaaaaaaacttaaaattaatatggaaccaaaaaaagcctgaatagccaaagcaactctaagcaaaaatataacaaagctagtggtaccatattttttacttcaaattatactacaaggctatagtaaccaaaacagcatggtactggtataaaaattatacttggaaaaatagaactgaatagagaacccagaaatattacttacctataaacaactgatctttgacaaagttgaaaaaaatatactctgggggaaaggacaccttattcagtataattttttttttcagagacagggtcttactctttcacccaaagctggagtgcactggtgagagctcaatgtagcctcaaattcctgggctcaaacagttctccagcctcagactcccaagtagttgaaactacaggcatgcaccaccatcctggctgataccctatccaataaataatgctggcataattggagagccatatgcagaagaatgaaactggacttctatctcttaccatatataaaaatgagctcaagatggattaaagacctcaaactacaaaaatcctaaaacctaggagaaactgttctggacattgatctaggcaaagaatttatggctaagttctccaaaggaaatacaacaaaagcaaaagtagacaaataagacttaattaaaccaaaaagcttatgcacagcaaaagaaacaatcaacacagtaaaaggacaacctacagaatgggagaaaatatttgcagacaatgcatctgacaaaaggctaatatccaccatctacaaggaactcaacaaaacaaacaaaccaaataacccattaaaaagtgggcaaaggacacgaacagacatttttcaatagaagacatacaagcagctaacaaacatgaaaaactgttccctatcactaatcatcagagaaatgcaaattaaaaacacaatgagataccatcttccaacagtcagaatggccattattaaaaagtcaaaaaacaacagatggtagtgaggatatgcagtaatatgcagtaaagggaattcccactcatacaccgttggtgggaatgtaaataagtataacctctatggaaaacagtatggacatttctcaaagaattaaaaatagaactaccctttgatcttgcaatcccactactgggtatctacccgaaagctatacaatcaacctaagtatccatcaatggatgattggattaaaatgtagtgtgtgtgtgtgtgtgtgtgtgtgtgtgtgtgtgtgtgtgtgtacacagacacatatatacctacttacatacacacacacacacatacacacacacaccatggaatgctactcagccataaaaaggaatgaaatcatgtcttttgtggcagcatggtttgaactggaggccatccattatccttagtgaaatgactcagaaacagaaaatcaaaaaccacatggtctcacttataagtgagagctaagcaatgggtacacatcgacatacagagtgggataatagacactggagacttcatatggtaggaggatttcgggagaaggatgaaataccacctctagggtacagtgtgcactatttgggtgatgggtgaactaaaaaacccagatttcaccactgtgtgatatatccatgtaacacaactgcatttgtgtccccaaatctataaagaagttaatttcaaaaaatattttgattacatgttgattgtatttgggacatattaaatgaagtatattatcaaaatatttttttctacctgtttctttttgcctttttaatgtagctactagaaacatttaaattatctttgttggctcatatttctattgggcaatgctggtctagatcaggattcagcaaagtatagcttactgtctatttttgtaattaaagttgcccacttgtttatgtattgcacatgctgtgactgctttcatgctatagtggcagagttgactagttgcaacagagactatatagctcgcaaaacctagaatatttatcatctggacttttacaaaagaaggttgctgaactctgatctaaataattctagaagacttggcaggacctaaaatcaatctaggaaaccctgattcttactcttgtaggtcacactcttaggtaaggaagagagaaccaaggattctcctgacactttagaggtgcttctggcttttgctccctcttattcctaaactactttatctaaacaagctgtaaactttcactcccctcctgctaagagcctggaaggagggactggagagccagcatattggctctgcatagaaggcagatttggagcattttaccacccagtggaagactatgaaaactttgctactgattcatgcatttctaaaggttttccagtggagacacagagtaagggctgaaaggtagggacaaacatatggactgacttaagaggtccagtgaccccaatgagcagccatagtacatttaaattatttggggtggtaaagatattttagacccaagaggtttcatcatcaagaacctttttcaaggaggtgtgtagacctaacaccttcattatcagctgacgccataagctttggggaatggagaagactggaaaggagatgtggaacacaggatagaaggcacaagaggctggagcttatcttgactagaccacagcccacacccgagaccgccctatgggcatgggccactggagggtaatcagagactttggtgtgacgcctccttaaaaatctcttcccactttcttctcccaaaataaatacattttctaagacaagaccctgaatcagaatcagtttttctacaaactttgggtggtgttaattcctgccaacacagggcaaagcatattacagtgaatggagttacagtattcagaatgaattatagggcgctaggcacgtgatttaccacctatagtaaacagggcttcacacatggtgtatttctgctgtgttggttagttattaactgcaaaaaaggggaaattcatttagaagacgtgctcattttttatgaggtaaggctgcctggagatgcatggcattttaaagcaaacgaattcctgggagagcccgagcttaccacccagaaatgtggcaaggaataaaaacatttacaccagtttaatatgaatggttgaagaaaatatctattgcacattgaacatgatatatgaaaccataacctactcttgtgtagtaagctacagaaccattcacctaacagattactattcgagttgacattattctgcatcttttcgatcttctcttgccaagtgctggaaactgtcagagaaagccagccagatacataggcactgttggcctgggggttgagaactcataagactcttgaaggcggaggttacccagtgacccccttgctgcaaactatagtggaagtcaaaggatgacagccaacataaacagcggctgcatgtggaacgtcaaagtcaagacaaatagaggtgggactttctctgtctcctgctccctttctagtctgtaaaatggagcttatttcctatcatctagcagaataaaaagtgccatatggctttggggggcctcagaagtgcttcttggttcattcttataacataggtggaatttgacctcctcaaaaattattaaggggtgactcttgcttaatcctactgtgatttattggctacatactggatatcaaagccaaaaggaatcgtaggagacgttttggtataactctttcttctcccagagatgaagaagctggagtctcaaaaaggttaatgaattgccaaatgtcaaatgctagttaagtgcaggactggtgctaagaatgcaagtatatctcaatttctggcccggagctcttgccttctacctttctgcttgtgtgtgcacacacaaagttgcttgcaactgctgttttctttttgggtagagtaatgaaaaatgacttttgatgtttttgtaaatttgcaaatggtctaggtcagtgtccatgttaagacaccttactcggcctgacactcctaattggttttaagattctgggcctgtggagctctttcttttaaactattaactacgaagttttatatttcaactcattcacatctactgaagtgatagcagcagttttatatgtgggcagattaatgcactttgggaattttagagaattaactttactgcccagtgcatttgtggcatatttaagtaaactagagaggccgatccttgcaaaagcaaaagatattctttttaatgtgaaatatatgggttttgacatgactataatttttagactctcaagaattttattctgatgttttgtctgacatctctaagctctttaatatcaccaaagaactcttggtttgtattaattctgtttcatttgtgtattttatgtgtttagtggtcatatttgaaaaacatctcttgtgagcgctctgtataattttggcagaaaattactttttttgtgtttctgtgatgatcccctgagatcatttttgcataaatccggccttctattttcagatacaaatctgttgtacagatgattcttcttagaagaaaagatgcatttgtagctaaaaaatgtaaattacttttcatggaaaatacctctctgggcccccatttccaaaatgtgatgattgcacatcgcatgtttttgtgcgtgctcaggggactgcttttcttataattagaaaagtcttgattgtgcagcaggtagaatggggtggcacggctgcttctgcagcataggtgagtcagtggaggtaccagaggaataagcaagagaccttatgtggaggtggcacttcactaagggaaggaggtcttagttgttgaagtgggtgtgtcatgagccttctttacaggatgggaatgttaacagaggacttttagacctggagacatttaaacacaattgccatcctctgtttgtattttcttcttgcttgtgattttttatacaggattcaaagttttatttggtctcttatggaagcatgtttggaatgaacaccctcctcatcacaagttttatgaaatagtggaggacaacagaaacctcttcctaaaatgtcttctgctcagtacaagggttagtgtttgagggactttgaggcactgctgtaaagcaaagtgcaaaaatcaacatattcagatttgtgccaaagaaagacttgagtttgagaacatttacatctgttttcaataattcctcgcatatgttgcagaatgtacgttatccatcttgttatccaggaaataacatttgttgcaaacagtttgccaattcgtaattttattgaatttgtttatcatgctgtggcttcatatgaggtctgaaagatggtgatctttggtgttccagctgttgtaacattctgcagtggggccttaattccaggatgagctggaattctttggagggtctgggctttctgagaactacagcataagagccggcattgctgatgggcaattatctttggggaacgcagtaactttgcttgtacattcctcaaccccattttcatttctggcttttaaatgtagtcttgggactgatgtgttgaatagcactccttgtgtgccctatactgtctcctttgaaacctgcccaaacttttaaactgtttttatgtttggtttgagaggatactgctccccaggaaaaaaatgattatttagaacgaccccaaactatctcagacctgaaaagaagtagattctcttcaacagagaagctaagaaatatctttttgctgcataaatattatcattttcttaaggagttgttggtaggtgaaaagaaagttcaaccaggtccaattttataattttcctattttatttagcaggcattttctttactgaggtttatattgtctgccaaaactaggaggaaaagaaaatattaacaaccctgaaagctctttcattctgaattattccttaatgtttttaatgatttattataaccacacaaatgtgatcttggggccatttggaagttattgagtttccttggagatgggacttggcattttccaaaccagagtttgcttttgtggcctggaagttgcaaggcatatatatttggaagactaaagattattccccaccaagaagttttgtcaacctgaccttctctactcttatgacgctgcacacacagcagtaatctctgcagaggagagcaaataaagtgaagaaatatagcggtacgtgttatttttacatcctaaagtaaattctccagcattaaggctgactgggaatttccatctcagagttctcatgaatgctgctccactttggtgttgtcctcttgaatctctttttattataggtctttgaaggaggtatttcttgtaatttattcagccagagagataagtgagatgtggaattggggaaacaagggggtgggaaaagccttctggggtcagctgtccctgccgttgagcctgcaggctttttttaggtgctgcagccagtcaaggtgaaggactagttcagctctatttagaaaacaagtgttatctaggttctgtgttatgagatgacttttagcacaagattcaaaagttagtcttggcaaaatggacattctttgaatgttgttggagctgaatggctctagatggtgtgctgagcccttcccatgagatgatgttccagaagaatcccagagatatgaggccatcctcttcagctccacaccaaagcaggcatccactcaaggccagctcaacacttcagctccacaccaaagcaggcatccacccaaggccagcccaacagttgaacccttccactagtaaggagcaaagcagcctggatcatggctgcacagttctcgggagaacagttgtctttgttttaatgggctgtctgtggccctgcagcttctctctactggccccaattctgagaatgcagttttaaaaatcactttttggaaagaaaaaaggaaaaattctaggatgttaaaaaataatgtttttctgatttatttttacctaaatctggtgttctgagtcaactttcaaggtcaattctgttattttaaggaataaaatatatttatttattcctgttttttcccttagaatatgttagtaacacttctaaagcattcatgaaatatcttaggtttgaaggaagattcagatatgttaattaagtctatctatacttcccctggcttgtatattctttagggtaagggatactgtcttatggcaaattttgactggtaccatgttcagcacttggcctacaaaacaaatgtttgttgttgagtggatgttgaatgcatacatttttgaataggccacttttttttttttttttttttttttgctgctgagagatgtcagttgactgcttgtatcccaacttcatcgtgaaaagatgtttttctgctattcactttaaaagcatctgttcatcccaagtgtgcagtgaaagggcttccctccttccacctcctctcatcatagattttctttgattagttatcactggatcaaattattttgcagtatgatggagtgggaagcatttttgagacctaggtcagccacttacctgcttatgagcattacttgggaaaatatatcgaaccaccttaaacgtccatttccccatctaccctcccttgaggggctgttgtgagcaaaatggcctgtgtgaagctctagtaacccagcagatgctcaggaggtagagatggtcatttcgcattattctgctggacttgaccctacatctcctgctgatctttgtgtatgccaggggtttgggccctgtctccaagtgcctgcattttagtgaacttggattctgagattccatgtacattagtacactgtattagtctgttttcatgctgctgataaagacatacctgagactgggcaatgtacaaaagaaataggtttaattggacttacagttccatgttgctggggaagcctcacaattatggtggaaagcaaggaagagcaagtcatatcttatgtggatggcagcaggcaaagagagggcttgtgcagagaaacttctgtctttaaaaccatcagatcttgtgaggcccattcactatcatgagaacaatatgggaaagacctgccccatgattcagtcatcttccaccaggtccctcccacaacacatgggaattatgggagctacaagagatttgggtggggacacagagtcaaactatatcattctgcccctgggccatcccaaatctcatatcttcacatttcaaagccaaccatgccttcccaacagtcccccaaagtcttaactcattttagcattaactcaaaagtccacaatccaaagtctcatctgagacaaggcaagtcccttccacctatgagcctgtaaaatcaaaagcaagttagttacttcctagacaaaacaggagtacaggaattgggtaaatacagccattctaaatgggagaaattagccaaaagaaaggggctattggccccatgcaaatccaaaatccagcagggaagtcaaatcttttttttttttttgagacagagtttcactcttgtcgcctaggctggagtgcagtggcgtgatctcggctcactgcaagctccgcctcctgggttcacgccattcttctgcctcagcctcctgagtaactaggactacaggcacctgccatcacgccaggctaatttttttcatatttttagtagagacgaggttttactgcgctaaccaggatggtcttgatctcctgacctcatgatccacccatcttggtctcccaaagtgctgggattacaagcgtgagccaccaggcctggccagggcagtcaaatcttaaagctccaaaatgatctcttttgactccatgtctcacatctaggtcacactgacacaagacatgggttcccatggtcttgggcagctctgcccctctggctttgcagggtatagcgccgctcctggctgctttcatgggatggcatcgagtgtctgcagcttttccaggtgcatggtacaaactgttggtggatctaccattctggggtctggaggctaatggctctcttctcatagttccactaggtagtgcctcagtagggactctgtgtggaggctccaatcccacatttcctggccacattgccctagtagaggttctccatgagctccccacccctgcagcaaacttttgcctgggcatccaggcatttccataaatcttctgaaatctaggtggaggttcccaaacctcatttcttgacttgtgtgcccctgcaggctcaataccacatggaagctgccaaagcttggggcttccaccctctgaagcaatagcctgagctgtaccttgaccacttttagtcatgactgaagtggctgggatgcagggcaccaagtccctagactgcacatggcatggggaccctgggcccagcccgtgaaaccattttctcctaggcctctgggtctgtgatggaaggggctgccatgaagacctctgacatgccctggagacattgtccccattatcttggctattaacatttggttccatcttacatttctgtagctggcttgaatttctactcagaaaattggattttcttttttactgcatcatcaggctacaaattttcgaaattttaatgctctgtttcccttttaaaactgaatgcctttaacagcacccaagtcacctcttgaaggctttgctgctgagaaatttcttccaccagataccctaaataatctctctcaagttcaaatttccacaaatctctagggaaggagcaaaatgccaccagtctctttactaaaacataatgaaaatcacccttgctccagttctcaacaagttcctcatcttcatctgagaccacctcagcctggattgcattgtccatatcattatcagcattttggtcaaagtcattcaacaagtctctagggatttccaaactttcccatattttcctgtcttcttctgagccctccagactgttccaacctctgcctgttacccagttccaaagtcgcttccacattttcaggtatcttttcagtggcaccccattcttggtaccaatttactgtattaatctgtcttcacactgctgataaagacatacctgagactgggcaacgtacaaaagaaagaggtttaattagacttacagttccatgtggctggggaagcctcacaatcatggcagaaggcaaggaggagcaagtcacatcttacgtggatggtagcaggcaaagagaaggcttgtgcagagaaacttctgtttttaaaaccatcagatctcgtgagacccattcactatcacgagaacaacacgagaaagacctgcccccatgattcagttgtctcccactgggcccctcccacaacacttgggaagtatgggagctacatgagatttgggtaggacacagagtcaaaccatttcatatactctccctagtttcctggctaaataaggtgatcacatatcataggttttctgtggctatctcattttaaagtatgttgtccttttgtcctctaaattattgaaatgtcaagaaaatctcaacaacttgatgtctagttttagaatctcccagccagccccttgcaccagaaaatagcacaaacgacattgtttaatgcatcctaattttaatcagaaaacagttatcctatttctggcatatcatggatcacctgactggtacaagagaaagaagggttttgtagggatattgcaaccacgtattaaagcctgaaagacactctgaagagcatctcatattctaatgtctctgcctattagggtggtgtatcaagaagatgtatcttgttcattggtactttcaagggctgtgatctctccataagtaagattatcagtgattggagccttttcctcctttgatgatctcttctctttttgcttagtttcccattgctgctgtaacaatttgcaacaaacttagtgggcaaaaataacacagctgtattctccttctgtccctccaaaattcacatcaatcctacgtgaagtatacattcaccccatcccaaggtcaccaaaagtttcagccattacagcttcaagtctaaaacctcatctacatctcatcagctaaaaataacaaatctcatgatctcaataatttaaatcaagtatgagtgagccgctaagtataatccattcttggtgaaaattactcttcatctgtggacctgtaaaatcagaagtaagttgtctgcccccaaaatacagtgatgggacaggcacaggagactgtttatagacattccattttaaaagggatacagtgaaagggaaaaggagtcagtcaccagtcccaagcaattttatacgtggcagggcaaacttctttaggtttcaggacccgggaataattctgtgtggcttgaggacctgcgctctggatttgagcttctacactctgggcttgaggctccacccactgggtcatccttcctttttcgtgaaggtaggatgtgtttgcagctgagtagttttatcagcctgtttcttgtctgtagaacttgcctactttacagccttctttcattttatcctttttatcccttctattctaagctgacagtatttctgctagtataacattctcaaaaaacttatggtatccaatgtatgtcatggggattcattccatgagacaaaagggtcctccatagctttttctggataattctatgtctatttctggcttctgttgagatggttgaggggattcacgagtcacatgcctaatctcttcaaagagctttctgtgtgaaagaatactctgatattttgacccttctgagttatttgccaaaggttgttcatttacaccctggctttctttctagagtatcccttcatggcagtgaacctcctaattttaaccttctttgcaatctgaatagctgagcatttcccaaatcatcaagtcctggctcctttttaattaacatcccttccctccacttatcttttccttcttgcctttcactataagcagcaagaggaaaccagattggaccttcaacactttgcttggaaatttcagaaaaatatccaactttattgctttcaagttgtgctttccatgtaactgtaggacacaattcagcaaataatgctgccattaaaaactaaggatcctcttccagtgtccagtgatatgttccttatttccttccgagctctcagcagcagtggctttaacatccatactgccactaatagtctgttgatgatgatttgggtattctctaagacagtgttggtttctctgcgacagtcctcgcttccttctgagtcttcaccagcggagtcattcatgccaatgtttctactaacagcctgttcaagcccatgtaagcttcttctatcatgctcctcaaaattcttccaacttctacttattatcaaattccgaaaccacttctactgttttagatatttgttacagcagcactctatttataagtgtaaaatctgtattcgttttctattgtcattgcaacaaatttccacaaacttagtagcctacaagtaatacacatttgttctcttatagttctagaggtcagaagttcaaaatgaggcatacagggctaaaattaaggtgatgggaaggctgtttcttttgggagcctctgagagaaaaatctgtttcctgtgcattccagtgtctagcaaccacctgtattccttgtcttgtggccccttcctccttgttcaaagcacatctctcagtttactgttttcattactatatcactgttttctccgactctgactcctcctgcatccttcttataagtactattgtgatgacattgggtccacccagataatctagggtaatcctttcatctccagaattttaactcaatcacatttgcaaagtccctttttccatatgaattcacaggttctgaaaattcatggacatatttggggtggtgttatgtagcctaccatatcgctattatttcagttctcccaacttttagaaggttgatagacagcacgtagtagtggaaggaactaatctgggagtcagaaacctagatttcagtcccacttgggctactaaaaggttttatgccttagatcaagccattttgcttttttggacctcaatatcatcagttgtaaagtgaggggattaaactgagtgatggctaaggcccttcaggactctctactgttatgcttctttggttctgggctttcattgcaatgaggtgcttctttagaaataagaaatggtgagttttagttgctgaacagtttagagtgaattagccaaaatggtgctgcagttcagtgctaaagtcagttgaggtgacttagtttactgttgttgttcttgccagattatgggccttttacatacagtagatgctcatcaaactcaatggaaaagcattatcaagcacagtttctcttagaaggcacttgcactgaataagaaaaaaaatcctcactctcttagtgtaggggttcagggcgacttaaatggtaaaatctgaggtctgagtaaagggtttcttatgttctctagggtggaagttatggctgaggaaggatgggaaggttttccgaaggtccgtgtctccagtaggagaaagcaggtcctttggagaaaatgtgcattggcttttgctagattcttgcagctgcacagaaggctgctgcagccaacacatgttatagagctcaagagagttggaagtgatgtctgatgctaagtcctccacaagcaaaccagggaaatcaactgaagaagaggcctcaaagaaatcaggtcaaggaatttaagcactgagtctaggaggattcagaagaggatatttagtttttcagcttgtcctctgggactctataccactggggactcatatacaatatttctgttgttgctaaagggcagtaagtatgatgattagaatttgaaaagcagtccctctggtaggccttaggattttctaaactgctttgcaaggctaggttaaatcttgtgtttttttaaaagaggaatcttctattcagcacacaaatgagcaccctacctttgagcctttgtaattttactcatgttatttcctatgtctggaaattcttgtccacatctttacctgcttacaatcttctctgtccttcaaggatctgcttaaataccatgctttcaaacaaaacctcttatttcctctctctccgaatgatcttttctttttcttaaactcctgttgaattttcagtctttaattttttaacagcattggccacagtaggaatttaaatgcatgctttctctcaggtgcattataatgtcattgagacatttattcatctttgcatctctcatagtacataaaactggagaggagggcttaatatgtgtagaaagaatgaatagaaaaaatatctaactgtacatgtaagcatagactcactgggtacataaaatataaattaatgtccatagaaatctatattgatatactgatattgatatagatatagatattgatatagatagagatgacttagtactcaagatagtgctgagtgttgatgtaagagatgtataaggcttgaaactctaagccttagtaaaaccatattctaattgtggagagaatatagcaaaatattcatgagcgatagtattaggtggggttaaattttgtgatacagatagtcactactcctgtatttcagagaagaggatgctctctgtaagctggagtggttggggagatctttgaggaggagaaagaatttgagtgagcccttgaatgatcaaacactttttcaggttttaaggtcttcgtagaaatgtcaaacattttcatgtttgtctataggacaattgtcatatctttcattttagttgttaaaaaatagaatggacaaaaaatggtgccagttcaaaatgaatttacatgtatttgtaatgcatgttttaaattttgtcttcaaccaagcttaggacacatgtggatttgaaggctcaagaattccaagtaaccaaaagagtataattgtattgtttataacagaaagaaaagataaatgcttgaagtgatggataccccgtctaccctgatgtgattgttatgcattgtatgtctgtatcaaaatatcttgtgtaccccatagatatttactatctactatttacacattaaaataaaaaaaaaaattccaaggctccttggtgtggaccatggttctcggaatctgtggagtaggaccttagtaaatacttgtgtgatggtgatggatttctggttaagatttcttgatttttactcttttaccaatttcttaactatgtcgctaaggtttagttagctttttttgttgttgggtagacatgtcctaaaggctttttgtacccgatctcagaagcttgtttttcaactgaattgaaatgtattttcaattcagtaaatgaagtatatataaaaaccacaatgactaaaggggcattttaaagaaggttaggggcaggaaaatcaactaaatttgatgactgaaatgttctatttttcaaatgtccataacattatcaggaggggaaaagccagaaaccattgtgattaaaactggtgatatatgagcgtggctttatcgaatatataatatgattatttcatttgtaaagtgctttgcaatgcatgctgagtcaaatgcaatacaaatactaatataatatccagcattgcaaatccagagaaaaatgtattgtgtatcgtcttatgaaatataatttccagtgattctgaatagtttatatagggaacattttttttcttgcttttcatgcttctaattaaatgaccagaataaaacaatcacttgaaaataaattctgaaagattatttcttaacatattttcatatttttgccagcttcgaactcttggattctagctggcatgccagctgatttgtgtgggtcatccagactgtgagttcaggtttttttcagggatgaaaaagtcaagcctcttgctttggctgaagtgtctgagtttatgataatgtaaatattgccttgtttgtcaaaaccaagcctgcatcttggctttcttcaggagacctggaaagagctactacttcttaactcaacaagcatttatttgtttcctacattgtgatcacatatgttttaagcattcttggtaacacaaagagtatttcctggtttcttgccaacttattggtttaaagtcctgcccagtgaagagtgaagatgtgtatttaaatactgcattgtgtgacagaaattccaagagtggtagatgatcaggaaaggagagacaatccatggattctagtaggtgggagagcacaacttgatatggccagtggcaatccaaccccaaagactgtgggcaagctggtggatggagaaatacaatggatggtgctctgaaggatttgggggagtcaaagggaaggggaaaaaatcctccaggcctatccttcacttagctttttatttttaacaaatgaaaaatacatagagcagttgtcatttgttaaagtgtagcagaaagagcgaaacaggccagtggaggcttcatcaagaatgctcattcagaatgatgaatgtggctaaacacacatttgttcgtaaaacttgcagagtggctgagcatcattaagcatgagaaataggtgcagcatgctgagaagagagtggagcaaacagatgttgtgaattttcacaggcatccttcatccaccagtccatcattaatatagttgaaggtgatcctttctttttatttaataagcacaaacaaagtgcatgtgttgtgattctgctgaatgcacttctttttctgaagaagtaagggcgtgcaagaatggggaggatatgtagacacatcagttccctgtgctcccataacatgatatcagccttggggcacagctagtgcagaataccacttttatttttccttttttttttttttcactcatcttgcagtagctctaactgcctcatcactctgtttgctacctagcagattatctggatctgcaggagaatgaaaagctttatggcttttgaccttgctaccttccaattctactccttaggatgcatccgactttcttttttttttttttttttttttttttgagacagagtcttgctctgttgcccaggctggagtgcagtggcacgatctgggctcactgcaagctcttcctcccaggttcgcgccattcttctgcctcagcctcccgagtagctgggactacaggcgcccgccaccgcgcccggctaagtttttgtatttttagtagagacggggtttcaccgtattatccaggatgatcttgatctcctgacctcgtgatccacctgccttggcctcccaaagtgctgggattacaggcgtaagccaccacgcctggccgcattcaacttttataatgacatgctacaacttgtttgctgacatcagctgggtagacactttttttccctattggcagaacttcattgaccctaccctgtatcatccaattctacttctttcccttccttctcttcgtttttacttcttggccctttgctagcatagatcttggcctacatacccttacaggccttccttcacttggaagcacagtccaggcttctcatcttgatccttggacccttgactaccaccaaaggattgagaaccctctcttttttaacctcatttcccagtttgtgaaatgaagatggtaatgcttcctttccagggttggtctaagtaaaagcattttgtgaactctgaaaagcatcctacaattattatgaatgttgaattgtgatctattaaacaatgagttctcttttgtagagttttcacttagggagttgtcaacatctgcttaaatcctcatggtctgtttgcctagagcttcacatttagtgccagatatgttgggtctgtgaagctgtatctgttttcactgtgtgtgtctgtgtgtgtgtgcacacgagtgagcacgcacgtgtgttgtatgtatctgttcattttcagaccaaactggaggggaaaaaacctacaagaaggcagtgaaactctcatatagagcttgagacaagatattgctttatcttgctattaatgaactatgaagaataacttataattttacagttgcgcctttcttcattcaaaataagcattattgggatcctgaataccctaaggcagaagtgaggaactccgtaataagtcatttcaaaatgcaaactatctactggtaatcataaatttgtttaacttgttacatgtactttttgaccatggcagctgtctgcctatgctttgaattggcatgttgagtttaagtgtgtttgtgtgtgcttttgtttaaagaccaatatctctactgtcatagagacccatctgagttaaaattgccaacattgccagggctttgtgacagtgctcatacatgctgtagctctggggttcatcttcagcagaattcatagaccagagtgccaggcattcactttgaagcaaagagaagtgttattttagctaacattgagcccacattctaaaggcaacatgcttggttcccgaagccttagcaagaggacaagataacatatttacatgttggatgtgttttaatcatctccttccatgggccttctcactctcaagtgcagcacatgtgtccttaaaggccttgagtagctgtggatctcctatggtttattatcgaacttaaatatacctgcagttaggaatgctatgttttgtctgtgtgaatgattgccctcaggaagagcatatgcatgtcgactcaagccagtcctgggagcctgagtcctaccttgtggctgccacccaaaccttgagagccctgctgttccctctggttgcttgggcacttggccaaatgcacaggaaagtggagtatatatgtggagactttgaatggtgtggtttgtcttcccacttgatactagttatgccgtgaagacttacctgtgaatgaggtctggtggtaacttatgttcaagcctggtgatgacagttcagctgctttgagatccaagcaccctgtaggtgatcagtgttatgccaagaggaaaggagggttggctttggcactttttggtaacctgcacgttctaaaagaaaatttctttattggaatgcatagtcatctctgctggtgcctctggagtagtgagtgagtgcttgctccagaactgatcttggtctccatgctgtgatcatcctagttaggacattgtcacagcttagatggctgtagtacaactagccctgggtttggaggcttggagtctcgtttcccctctgtctctgtttcttcattggtagatggagatgatggggctgaactcatcgcttgtttaaagttcctcagttatttagatatccacgtttttctgggtctttctccatgccaggcattgaaatgaaaaccattgaaattttaacattatcaatgaaaactgggtttactctaagtcggggttggcaaactatggtctgctgcctcttttcatatgcctgcaaggcaaaaatggtttttacattttaaatcatggagaaaaatcagaagaatactttgtgacaagtgaaactgatatgaagttcaaatatgagtgtccataaataaattctgtgcttctcattagtaagctgtgttataagaaattatgctcaatatttattatatttttaattttgtcagtaaaatttatttggcaaaggaatttttttctcttgttagtttctccatagtacccttgattttaccacttggcctagaaagcctgaaatatttactctctggtcctttacagaaagtgtttgctgacctctggtctatgttatttcacagtctcactagatgagtggtttgcaaactgtgggtcatgatccattagtttttggtgaaatcaatttagagggttacaaacagcatcttataaataaatgaaataaaagagaattttaaaagacaggacatatcaaagtgcattgcatgtggtatggcgaatgctgttttatgaagtttttctttcagatgggagcgtgtttgtatgtgtgtacatgctgggtcaccatgtcaaatataacgtgggtcatggcccaaagaggtggaaaagggtggggcatggtgtctgacacctataatgccagcactttgggaggccaggatgggaggatggcttgagcccaggagctggagtccagtaacacagtgagacccctgtttcttaaaaaaaaaaaaaattacctggggtggtagcatgagcttgtagtcccagctactgggaaggctgaagagggaggattgcttgaggcctggaggtcaaggctgcaatgagccatgatggcaccactaccctctaccctgggtaacagagcaagaccttatctctaaaatacgtaagtaaataagtaaatgaagaggtggaaagccacagcactagagcacaagctctttgagggcagaaagcctgtctcattcatttttgtttccttgggcctggcacaatgcctgggaaaaaaataggcttttaagaatgtttgaagagatgaattaatgagttcagggaagaaataaggcatgactattgaacattatggacacagctactaaataatctctgaacatgtcttaatgtgtttagctcaatgcatacggtttcctgaaatgaggaaatgcatttcagagagtgaacaaataatttattttctgtattggaagatggcacctaggaagctgggtttgagttccatcctgaaggatagtcaggtcatgtgttaagtgtggtatagagaagggggacaagcattggcttaggggtcctgagtgccagtgcttgctctaccctgaacttctgggaacttagatgagtttcctgtgtctttcttgccaaattccttcagcccaggcaaagtgagaatgataataatgattatcagacactcagctgtgaagatcagaggagaggatgaggtggagagcactttgaaaagtataaatccgtgtgcaaaggcagtgctcattattatgtcatgttaaaacgtttgtatcagaccctttctgtgggcaagacatgtgcttggcacagtgggaactagaaactcagaccccttaaggtcctcgtggttaaactaatgaatctttaaggttgttatactggtgaaaaggtaaatagcaacacaaaatttaaaataagccaatagaagaggagatgttgtaaggtcatccatgcccttgcaaatgttcagactccccaggctgaggcaaaagctctggggaaaggtgagaaggggaggtggtgccagaggtatgagatagagagtcttgaatagaaaggaaggcccttctcgctgggctgtggtagtggcagcagaaaggagaagcccctgtagatgaaaaagtcccctctcagtgagtgactccctgggctaattgctgcattactctctttgatgggcctgatggtgctgagataacaaaatgaaaaatcaaatgagaaatggaacccaggagtctaaaaagttagtaaattttgacattagaaatataatcaaatttcaccagtgcttttctgtagtgacagccaaatccatccatgtcagagcaatggcctatggtatgtggtttcgtgtggcttttcttccccctttctcttttccttttgcaaaatcagcattaggctatttggaggacaggcgagaactattatgttaaattgtgctacctacaacttaagcttctgtctttgctaaagctgccagtttttataaacaacagaagacagaaagggtttactaagaataatgttgaagcccaaaagaatcctacagcctataaatcttaatagaggttctgagattccagcaggctggatgtgtctcttttacccgggctcactccatcttggctcccccgtgatgactccaattttctcgaaacacaggcacagtgccttgaatttacttgtggcactttttgcctacaaacaggaatacatgcatataacctatgcaaatcaataaaaacatgtcaagaccccttaggtcgcactactctcctaaaatgcaatttatcttgctgcaaatgagagtaagggactaggtaacaaatagcgtctgatcatttaactagcacctgttgtcaatgcatttgaaaacggcatttttcatttgacatacagtaaattgcattttcatatatatcgaatagaaaagtgagctgggatgtacatatgaagccctttatgaattttatgaacaatggatattttagagctgtatgtttaaaggggtcacgtcagttgctgcaaatttatttgttccttccagcattggttgtgaacataccatagttttcttatggctggatgttgaagtgtggcaacgctgaaagtataattatatcattcatgttaggtgaaggacaattactataatttttgtataaaattgaatataacttaaatgtgtaaatatgatttttttttgtttttttttacaaaagtttcttgggggaaagctgctttttatacattacatttttcagtcaattcctttgtcggcttaaattatgagccacaggttttttttttaaatgcaatattttgtttgcagacgggtggctgttgcacaaattcaacaacacttaggcttatcagcaacaatggttttcacattagtgagcatggtttggcaatattatttgacatctggaacaagctatattataccagacatatcaagtataactgaatggatcatttaactggcatttgtttcaaaaactcccactccagcttttgcctggctgtcatgatatgccggcaacacatcctgtgtttccctggcttctgtgtccctcattggcatttggcagtctcatgctcccttcccaccttcaggtggacacttagtcatcacgacgatgaggccatattcttgcgtctctttttggagaagtccaggatgccaggtagctgcagagggaaggagctctgtgaccattttagccaggactcaggccatcaattgcaccatcagctcttctcttattttgagtgtttgattatggctcccccctggcacatctacatgttttgtaactatgtcacacagggagatcggctttgttgaatttcctgtaacttggatagagaggagaaaaaacaggaaagggccctctgcgttgcatcctttaataaaagaaccacatgggggcagagagagaagaagctggaagtaagaggaaatggtaatagcagaattttaacacttagtttttctcagtctacctaagattttcctttagcaatttggagtatatagtcacaacttggcagcctagcaccaaagttgtatatcattgctgctattgttttactttgttgctctgcctaaggaattcactccttaggatgttgaagccaggcttatgaagaatctccatggggaaactggtatgaaaatgctaggtacctcctaaataagaagtaatgcatttacttcttgcagaaacgctgttgcttttgttacttatttgtgtgtgtgtttgtgtgtgtgtgtgtgtgtgtgtgtgtgtgtgtgtgtgtatgagcttttctctttaaactaagcaggatataagcagaccccacccagcttagtgagtaaattcataccaaccattcaaaataattaaagggaaagaaggacttgttaagtaaagcaaataatgaacaagtctcaaaaggcaaaagccaaataatgagaaaagtcataggcttaacctcattttcactgcatttggtaaaattgtttttatcaatataaacaatcagaaattgaggcttgaggcagaaaagggatttattatctaactaatgtcactgaaaggaactgctcaaggtggtcatagcactggaaagaaagaagcagccttaattctcctaacattgccgtttagattagttggagacaaattcatttttcattaagtcttttattcattccacaaatatttcatgagcttcaaatgttatgtgcaaagcaccatattaagtgtggagtgtaggcaaagtaaataaataaataataccgaaatgataccaaaaacaaaccccccaccaccaacaaaaaccaaagcagaacaaacccatttataatagcatcaaaaagaatacttaggaataaacttaaccaaggaggtggaaaacttgtacaaaaagtataaaacattgctaaaagaaatcaaaggtaccaataaatggaaagataccctatgtacatagattggaaaatttaatactgttaaaatgtcaatactacccaaaacaatctataaatctatgtaatcttgatcaaaatctcagtggcaattttgcagaaatagaaaaagctattctaaagttcatgtggaatctcaaggaaccctgaatagtccaaacaatcttgaaaaagaagaataaagttggaggcctcatacttcctagtttcgaaatgtattacaaaacaacagtaatcaagatggtgtgctattgacataaagacagacacatagacaattggaaccaaatacagagttcagaaattgaccattgtgtgtatggtcaaatgattttcaaaaagagtgccaagacttcaccatgggtaaaggacagtctcttcaacaaatgatgttggcaaaagtggataaccatatgcaaaagaatacagttgggtcctaacttcatattatatacaaaaatcaattcaacattttatagttttagttattactcttagggtctaaaactataaaactcttagaaggaaacataggaaagcttcaatgcagtggattaagcaatgatattggatatgacaccaaatgcacaggcaacaaaaacaaaaatagacaaatggaactacatccaacttaaaaacttcacatcaaaggaacaattaacagaacaaaatggcagcctatgtgatgggaggaaatatttgcaaatcatatatatgtagttaaatccagaatatataaagaacttctacaattctataacaaaaagatgacctcattaaaaaatgggtgaaggacatgaatagaagttctccaaagaagatatacaaatggctaacaagcacatgaaaatatcacatgattcaacatcactaatcataaggggaaaatcaaagaaggtaccaataaatggaaagacatcctctaaaagattcatcactaatcataagagaaagaaaataaaaaacatgagctatcaccttatacccatttggatggccagtatcaaaggaatagaaagtaacctgtactgctaaggatatggagaaattggaacccttgtgtactgttggaaggaatgtaaaatgatgcaactgctatgaaaaacagtatagaggttcctcagaaaattaaaagtagaattaccttatgatctagcactctcacttctgtatatatatctgaaagaattcaaagcaagatctggaagggacaatttctcacttatgttcattgcagcattattaacaatagtcagtaggtagaagcagcccaaatgtccatcaatggatgaatggataaagaaaatgtggtatgaaatgttatgcagccttaaaaaagaaggaaatccctgtcacatgctacagcatgaatgaacctctaggcttaattaaatgaaattagccagtcacaaaaggacaaatactgtatgattccacttgtaggaagtaactaaagtagtcaaaatcatagaaacaaagtaaaagttggtgatgatgtagagtatgggttttcttttgggttgtggagtggaggcccattgcttcactgggtgaatgagcagcttttctaccagagcctgctgtttgttcaacaggcctgtaaacatacctctgtgctatgctgagtcctggtactgtgatccagcattgggcacccgggactagtctcttcttttcctgcctccttcttcctgggtattcataggcatctgcctatttacttccaaattccaagggagaattgggctcataaatcttcacaataccccagatgcattacagtgttactcactggcattgttaccttaatgcctctctaattatcttgtgtgcccagaccatagacacttcttagggaggaagagcaagagcagaagaggacagccacacctgcatcactcttctgtgtaagttccatctggcacatcctcttttctctttgggagggaaaagtggctcgttttgcccttagacccattcttgcccatactctgctttgctgtctatcacaggggctgtcatctgtgggggcagttcccaagctccttgaccagccagcttcctattgggtttgaccaatgggaggccctgtcaggagactggaaggtggagcaagtggtaagccagggtatctgtccctgtcttctctgcctctggtagcttctctggcatgggctgatctctgctgtggctccaactcctcctataggacatggcctaccagggcttagttttagttggtgaccctcgtcccagtgtccccattgtctttcagtctgagagtggtaatgccttcttattcttgcttctcctgtgctgtatatccttgctgtaaattcaattcccagcattgcatttcttcttatgtagatacttgaagcagttcctattttctcggtttgaccctaactgatgcagttctgtaggcctttagaaagccctaagtagttctatggaatccacccaagtgtccatcaatgatagactggataaaaaaaaattgtacatatataccatgaaatactataaagccataaaaaggaatgagatcatgtcctttgaggggacatggatggagctggaagccattatcttcagcaaactaacacaggaacagaaagccaaacaccgcatgttctcacttctaagtgggagccgaacaatgagatcacatagatacagggagggaaacaacatacactggtacctttcgggggtgaggttgcgggagggagagcattaggaaaaatagctaaagcattctgggcttaataactaggtgatgggttgataggtgcagcaaaccaccatggtacacgtttacctatgtaacaaacttgcacatcctgtacatgtaccccaaaatttaaaataaaaatttaaaaaagccctaagtagttctgttgaaaaaaccatttactgaaggaaagcaagattggaaaccaacagtgtcaaatttttacacatggttcagtattagttatagtattagttagttgtctgctgggtctgtagccaaagctgaaagcaattgatgacaatgtgaaggtaaactggttcatgtttgctgagtgtttttttacttgtggtagcatataaattgtgaaatgggatggaaataaatgctggtatcttagactttattttagatcattatgatgataaacatggtgttttcatattatagaaacttctatcatcataactcagcatggatagtctatccagtttaataagactgtatttattatatgagcaccttgatggtctggcatcaggccagacataaactagaaagagagcccagtataagctgaaaagcggtctctcaattgggaataaaaagattaaaaactgcagattacatttagtctgtaaccattttttcattttatttgagatttttaaaaagtatagtagggctattgtgaaaattgtaaatgatggagtcttttattttaggagtctttcattcctttttggtgtatgctggaggtgccccaacaagctgtcaaatccactattagcttcaagagttgggcattcccactcaaacttagtgttaaaaacattattttctttcttctcagtttttaagctcccaagaattactgggtgggtaagaatctagtgtttttctgttgctcatataacaccatctgggtttccaagaggtacactttggcctgagagaatggctgttgagtggtatagaaaacatcaaagtcaaaacagtaacatattaaaaaatattggttcatctaatacacagggtttgggggttagaagctaagatcactcggttcggttcctgccatcttggagtttataatctactggaaaatgcagacaatcaggatggtaactgtgaagtttcggggccttgggagcagaggaaaggttgtctggacagatctggaagctgaaacttgaaagacaagaggaattcatttgacaggagttgaaacagtagtgttctgggcagaggctaccagagtatgcagaggtttgaaggcatgaacaatgagagaacatattgtctcatgagaaatgacacagaaatattttaaagttgggtctttctaaaagtaaaataacagctttaaaaaaaattgtttttttaaccccgcctggaagaggatcattttggtggttgttgttgttcaacatgattgaatatgattgggtattattacttgctgatgggacttaattttctcttgtttaaatgtgatccattatcttgtgtctagaacatattaaaatgacttcaaaatgagaaacaagggaaccttggttacttcagcacaaacatccttgtttattgagctgacatgaagggtgctgggatattttaatattacgataatatagatgcttaaatctcagggttaaagaactagattagtcctctgtgatgctgggctactcagaccataaaggtaactcagtgtttactgttatgtttttctattcttatcctgttgtgtcttgcctcctggcttctctctttttctttttttcctcttctttccttccaactcaaaactcatcaacttgcaatacccctgataaaactcatttatactgcttaccaaattttctggcttcagccagctgttcagttttttttattgtggaaggccccaaactcttctcactacttgttctgaagataaattagcgacttctaaataatgcagtgaaccctaattctctttgattagtagcaagttagatgatagtgacccattgaaattggccatcagcataaataatgagtgaatgaactgataaaatgcaaagtcactggccatcataaatcaaatgaaatccactttctctggaagtcactgaaattagaagtccatgctcctattaattattttgccttctgaagacgacagtgttataaatcagccttgaaaggcccttcacttagaaagctgaaggagtacggctgcctgcaaattgctttgtgtacgcacctaattgtttcttaagtaattcacctttgtagcattgcttcaggaaacgaagaaggtcccttcggttgagatccatgacttgtagccttaggaatggccttgagaaggctctctggaaggtccaaattggagtgggcaattccccacccccttctctagaacagatatcctcatgttctttgtcttacaactcagaccccatcaggtgggctggcatttttggagtggtttgctatggcaggatccaaaaaaaggctggcagtaggccctgagccatttcatcatcttgtctcaacttaacttccagccaggcctaagaagccaagcttcactagaattcagtgaaaaccaagattttaaaagttgagaaaaaatagagattgaaaactctgacttctgaggttcattgtaaagagttgttgtaatctgcatatattaggtatgaagtgacacataatttttggtaaaaggtgggtgggaaattatattcatttaggagcctattttgcaacagatattttaaaaaacaacactttttggaaaagaggttaattggatggtaggaaatgttgtaaattagtttcatttaggaccattacctgtcatttaaagttctgaatttgagactgctgattaaaaaaaagcaaaacaacaacaacaacaacaaaaaaaacaacaaaaaaatagtaatctcttgggtgtggtctcaaaaatttggtccagctttgagatgtgatcctggattgttagcaaatctattcagagctgacaaggaaattctctgttgcctattgagtgtgggtgacttttgctggcctctgtagagagatggatgggcaggcttgtggaggtgaagacagacatcagtaggcggtagctcctgagacttccagctgctagttaagtatatgatgagtgttcaaaactagctttagtataggctccatagatgggggttgtattagtccgttctcatgctgctcatgctaagtaatttataaaggaaagaggattaattcacagttctacatagctggagagacctcaggaaacttacaatcatgtcaaaaggggaaccaaacacattcttctttacgtggcatcaagagagagaaatgctgagcaaagggggaaaagccccttataaaaccatcagatctcatgagaacttagtcactgtcatgaaaatagcatgagggaaactgccctcatgattcgattacctcctactgggtccctcccacgacacatggggattatgggaactacagtacaagctgagatttggatggggacacagccaaaccatatcagaagtggaatgaagatagggtttttaaggaaaactcattcttacttttctcattttctaaacttcctatcatctgctgcaggcctgcccaattcccctagtggccagtacagtaaatgtacatcctggccttggaaaatgaaaatgatctcctggattgtaagaagcacattctcttacttctttgtgttgtgataatcagagtgtcctggcatgttctaaagcatccacctaaagaagaggggtgtgtgtgtgtgtgtgtgtgtgtgtgtgtgtggtcacatgcacacacagtcatctgcacagctgaaagaacaatctgctttcaagtgagtggtgcaaattctcatgtgtgagtgtgttctggtgttggggttagttgctgctaaatcatttgtgcatctgaataacccattctcaaaactaaacttaatgatgtataattgagcattatgtcatgaagtagaaaggagcaattgttccctgagatattgaataccaaatgcaaagatgttctgggctgtgtccttgaaaccagccgactctgtgatttcacagtgattccatgaggcattctacaccttcaggatgagaggacatcttaatcctctggacatccccagaactgcctatcccagctactgggcctccccaactcttattagattcctacccatagtagtagaattctgcttgttgttggagaaggttggtggaagaaaatgcagctaatggtctttctgccttgcttctggaagtccaggagggccctgccagtggtctgtgctgcaggacagagtgaggcatctgtgggcattccttgcctggcagctgatattgtgtgtctctgttggtcctcattcatctagcttgcgttttagagttgtggttatgtaatgggggcgtgtaataaagatttgttgattgttggacatgctgtgggagtgcaggaggagctcatgcgaatgagtggctctagtatttttggatttgtttctgaggtttgtacaggataggcaaagtctcgaccatctataagactgtcctcctggcatgtgtcatttattgctcaaggtttctggattttagaacatccttctttgcttgggtgatattcccctgtgtggtatataatcaagtaaccatatgtcctggtttccctgggatagtctcaatttatgcctatttttctagtatgattattaatattggccaccccccatgccttttactctcaaaatatccagatttggatggccactttctatataatactgaaaaggaatgtttatatttgttgtcctagtaccatagaaacagtggcatattgaaataatcaaggctttggaaaaatgaccaatttatttatttatttatttatttatgttttaattatactttaagttttagggtacacgtgcacaatgtgcaggttagttacatatgtatacatgtgccatgttggtgtgctgcacccattaactcgtcacttaacattaagtatatctcctaatgctatccctccccactccccccaccccacaacaggccccagtgtgtgatgttccctttcctgtgtcctgtgttctcattgttcaattcccacctatgagcgagaacatgcagtgtttgatttttcgttcttgtgatagtttgctgagaatgatggtttccagcttcatccatgtccctaaaaaggacatgaactcatcattttttatggctgcatagtattccatggagtatatgtgccacattttcttaatccagtctatcattgttggacatttgggttgcttccaagtctttgctattgtgaatagtgctgcaataaacatacgtgtgcatgtgtctttatagcagcatgatttctaatcctttgggtatatacccagtaatgggatggctgggtcaaatggtatttctagttctagatccctgaggaatcgccagactgacttccacaagggttggactagtttacagtcccaccaacagtgtaaaagtgttcctatttctccacatcctctccagcacctgttgtttcctgactttttaatgatcgacattcgaactggtgtgagatggtatctcattgtggttttgatttgcatttctctgatggccagtgatgatgagcattttttcatgtgtctgttggctgcataaatgtcttcttttgagaagtgtctgttcatatccttcgcccactttttgatggggttgtttttttcttgtaaatttgttggagttcattgtagatcctgggtattagccctttgtcagatgagtagattgcagaaattttctcccattctgtaggctgcctgttcactctgatggtagttccttttgctgcgcagaagctcttgagtttaattagatcccatctgtcaattttggcttttgtttccattgcttttggtgttttagacatgaagtccttggccatgcctctgtcctgaatggtattgcctaggttttcttctagggtttttatggttttaagtctaacatttaagtctttaatccatcttgaattaatttttgtataaggtgtaaggaagggatctagtttcagctttctacatatggctagccagttttcccagcaccatttattaaatatggaatcgtttccccattccttgtttttgtcaggcttgtcaaagatcagatggttgtagatatgcggcattatttctgagggctctgttctgttccattggcctatatctctgttttggtgccagtaccatgctgttttggttactgtagccttgtagtatagtttgaagtcaggtagtgtgatgcctccagctttgttcttttggcttaggattgacttggcaatgcaggctcttttttggttccatatgaacttttaaggagttttttccaattctgtgaagcaagtcattggtagcttgatggggatggcattgaatctataaattaccttgggcagtatggccattttcatgatattgattcttcctacccatgagcatggaatgttcttccatttgtttgtatcctcttttatttcattgagcagtggtttgtagttctccttgaagaggtccttcatgtccgttgtaagttggattcctaggtattttattttctttgaagcaattgtgaatgggagttcactcatgatttggttctctggcagagacacaacaaaaaaagagaattttagaccaatatccctgatgaacattgatgcaaaaatcctcaataaaatactggcaaactgaatccagcagcacatcaaaaagtttgtccaccatgatcaagtgggcttcatccctgggatgcaaggctggttcaacatatgcaaatcaataaacagaatccagcatataaacagaagcaatgacaaacaccatatgattatccaatagatgcagaaaaggcctttgacaaaattcaacaatgcttcatgctaaaaactctcaataaattaggtattgatgggacatatctcaaaataattagaggtgtctatgacaaacccacagccaatatcatactgaatgggcaaaaactggaagcattccccttgaaaactggcacaagacagggatgccctctctcactactcctattcaacatagtgttggaagttctggccagggcaatcaggcaggagaaggaaataaagggtattcaattaggaaaagaggaagtcaaattgtccctgtttgcagatgacatgattgtatatttagaaaaccccattgtctcagcccaaaatctccttaagctgataggcaacttcagcaaagtctcaggatacaaaatcaatgtgcaaaaatcacaagcattcttatacaccaataacagacaaaaatgagcgatttaaacttactccctggcatgtgacctctggcaagttagcttctctgagcctctgtttctttatccaataaatggggatcgatcattgcacatccctcacagatttgtgctgaggattaaataacagggaaaagtcccagcagattgttgggcacataggtaggtagaggataaacatttgttcttttcctcagaatatgccaagaaacttggcgggttgggggccagaggctttggcatgtttccgaacctcctttccagttgatgcaggcagttcagtcagcatcaggtgtcacaaaaagagagagaaaaatcatcctctcaccacctggtgtgggtgagagaaggtcctctttgagggaaaacctctccccctaaggctcttggaatgccccatgtaaagagatgcaaaaagatatccccagaagagtgagaagctgaatttgctgtttgctcaaacaaaggattgattcagcatttctagcaaaaggagcaggaggcttgccagagggccaataaataactttgcctttcacatgtaatataatggtgaaagtaatctattggtttgggagcctctatctcttcatctgcgaaatggggatagagatcatagaattaaaggaggccataaagataaagcagtgttgcaaactgtagatgcagggcaaatcatgtttttcttgtttatacagaagtaaagcaccaaatgagctgaacactatcctggggtaaaatgaccgcatgaagcaatacacataagatgcacaggtctttcagacgatcttcattcatacgcttgctgtctttcgctaatgctgcaggagggcacacacagttctgttttactggccctacagggattgctgattttaagcaagttgtgtagtttcatggagattactattcctgttcacatttttaattagaaagagaaaaaggatttatttttctcagggcttccagcccagatggctcaaagtctatggaagaagggtcccgagtgcaggtggccaggcctggttgtctgctgtgatgctggctttatgtgacctttctggctgcctaggtggggcacagattctgaggcccccccgtaccagcccaccagcagtgccctggcccctctgtctactcagtagaagcaggtaccacatggggaccctgtatcaccgcagtaagtggcagtatgcagctcatgctaggcccggtgaaaagatgctgatagcttgcaggagcccttggaaggacaagctaaaatatatccatatgtgctcatgtctgctccttctggtacctgtcgcacccttcccttccccatcttctcttcttccccctctccactaattatcacagtacagcctaacaatgcataaggctctccacccaaactaggtgggactctgtgctgcatttatttagctaatacttcacatagcacttaatgtgtgctgagtaacagcagcattcccttgaccaagtcacatgccattgagagtgggagaggctgggattagagcttagccagctgatgccacagtccttgctctacattgtttttacttcccatccccctcctttctaatggctacctttccattcatctggtttgcttgttgtttgttctataaatttctgaaaatactatgaactcttaattggagaatgcttgaagggaaggttgccctgccatgtctttttatgcattgaaaattaaattttaactacacaggtattctccatactaactgctgaggctcagttctttttggctgctcctctacccctaatctcttccccagaagagataaccacattaggaatttgctacattgacttctgcttcttctgtgaatttatatccctctctgccacaggcacgtttatttatgcatgctaaagaaagtatagtgctgtatacattcagcagcttgctgtttacacccaaaggtatgtcttagctatcttttcatgtcaatacatgtaaatatacttgcactttttgacttgtgtgcaatattccatagtgtggctatgccaaagtttatttgatccttagctttctaatgggcattttgggtgttggtcatttttggtgtcacataagtaatgaatggccttattatgggccttttgtgcatatgtacaggtgtttctcttgagtatgttctaagagatggaattgcttaatcatagggtttgcacattttaaatggtactggatgctgtcagtttggcccctgtggtgatttttatcagtactcacccctcccggtgatttatggaaagtattatttgaccagctgccctgcccacatttggtattagcatgctttcaaaatgtttgcagtctcttgggtatgacatggtacatctcactgccatttacaattttcattttcctgccaaatttgaaaaataatttcacatatgtattgtcttttttgttgtgaattgcccatgtatattattggttcatgtttctgttggcttgcatgacttttagttattggtttctaggacatctttatatattcagggcatacacacacacacacacacacacacacacacacacacacacacacacatacatctggcctcgatgcctcatacattgcaattattttcttctaatttgttgccattcagctttatggtaccctttttatatataggttttaaattttgatgctgtcaaataaacaggtcttctctgttatgctatttatgtctaatttaaggccttcctgaccttttggctgtaaacatattctcctgtatttcttctaaaactttgattattctaattttaccttttaggccttgatccattgaatttttttcccttggtgaatggttttatgttaacgttgatgttaaaattaatatatttttccccaaatggatacattcgacccaacaccatttgtttttaggtcattttgctaagtattttgaaatactgtttttgttacatataaaatttctaattatacagaaaaccagactctctattctgttccgttgatctatttgtctatctgtttgctattagaagtattaaaaatagtgtctaaactggctaagagtatttcacaaaatttatgagaggagcccaagaggtcgccttgtgcaagaggtcaccttgctctttgctggctgttggcttcaactgaacagtaatctctagagcctgaggactacgctcgattcctgtgttcttggaaagctagatcattatgatgtttctggtttttttttttttttttttttttttttgagacaagtgtcttgctcttttacccaggctggagtgcagtggcgcgatctctgctcactgcaacctctgcctcccaggttcaagtgattctcctgcctcagcctcctgagtatccgggattaaaggtttgcaccagcatgactggctaatttttgtatttttggtagagacagggtttcaccattttggccagactggtcttgaactcctggcctcaagtgatctgtccgcctcggcctcccaaagtgccggggttacaagcatgagccaccacacctggcacattatgatgtttctaactcatgctttgaagcccaatgttgcttgtgtgatacattttattactaacaaacattggaacgcttctcataggctttgaggcatgtgagtcaaagtgatggtgacagggtgtccatcagaagatacaggttctaattttaattctgccctaagttctgtggccacagattacttaccctgcctgttatacactggggaagaactcggattgagtagacctagcatcctggcttgcacctgccacttattgaacatggggtttggggcaagtatttaatttctctatctcatctgctaataaagatattattgacctctcaggatggttctaagagatttttatagaaataaggttataagatagcattttgttaactgtcaggtaccctggaaactggaactatatactaatgtgtacaagcttcattttcattttggtccaatgacgataataaatctttgtctcacctgcctcagatagctgttccaatcatcaaatgggatgtgctttgataaaattgaaatgtcatacaaattatttattgctgatgaataccaacaggtggattggaatcagcaaatattaaccaagcccatggggttattacagtgaagcagggtcatattagctgggtatcctcaggggagaattgttggagcgtgatttatccatttataggggtcctttttactcacttgggtgaaaaaaggtgtaaagttggtcctttgaaagactcaaatggtctgttaagtgtgaataatgggagaacaagtgctgtatggagttcttctgttacaagagtcaagaggcagagtgggactggctgcagtattccttgtgttatcactggctatgtctagagtttttcaaattaaaaaaggaagttttattttttatttgtttataaattgtgaaatgcttctctttttctctttccctacttacctaaatgtaagaacactaggtcattgaatattaaagtgaaagactagaacaagaaaaaaaaagatagtttcttgggatttactattataatggcaacagtctttatccctctagagggaaggtgctagttatggtggattcttactgtggtggcccccaatgaaccacacttcctagtagttcccttttatatctagttcccttttatggtgactctggacttggcaaatgggacattagcatgtgggatgcaagcacaatcttagtaaatgcttgcacattggagctggtcttcttggaatgcttgctcttagaatccacctgccaggtaaagaagctctacctagccaatgtggagagaaagagctcacagcctccagctatcccccccaagattcttgagatataagtgaagccatcttggacgttccaattcatgccactatctgacaacaaatacatgaggggcctcaaatgagaccagtagaagaactgagcccctatcaacctacagaattatgggcaggtaaaatagtggttgtttaaatccactacatttgttatatagcaatagataatcaaaaccttgggttcacacacacacacacacacacacacacacacacgcacttaagtcagtttaatgtttgagcatgaaatgatttttcatatctgagaagttggtgtttttggacttgggttcaggctactttatcaggaaatacttttatttacttcctaaatttagttcagactcaagatggagcattgcatttggggtatgtccatttcattaagaaaaaggtagtgaaagaactacctgttttcccattagggcacagtcccttcccattaggtcccctcaatccagaagaggccatgaggggaggtgactgagaaaggatgtttatttctgcagcttgcatgcatggagaacctggaagaatttataaatccatcatttcaagtcattaggcgatatgttggtcagtccaggagactctgttctcattaattcaggggagatttacttgtgtcaccctcattagtatttatgggatttatccacatcaatcggtagtgcattaacagggaaataactaaacctcctagggtttgttggcgctaataaaatgagctggaagttccagaaatcaccatgatcagaagtattctaaatcagggctgtaattgatcctttcaaagtaccctcaggatgtttttctgttcgcttcacttccagtggcatttgcatattagcatggtgtctacagccttagagggcagtccatttcttaccatgaaacgatgtgggagaacccaatggagtgttgaaaattcatcgtcagaccagggcatctatgtaaacaaagggttaattttcttataattctttttgtttggtcctggcttataaaaaaaaaagccctgcatgtaaatatatcttttatgtattctgaacataaagatagctctgtcctaccatattgatttattagattctctgacattttagttgtggtcgttatgttatatttatgagatgaatgttggattccctcattatgttatcctcatttattttacatacttttatggctggttgtgcatcgctttacagttaaagctttattgcagctgttagcgttggggggaggggaaggcaagtagttattgatcggaatttacatgtttactgttgtaatcatgatttatttaatctgtctgcacatataagcccactctctgaaatcaaaaatatatactgtatctatattttagatggtggagcattcattggcaccctcatgccctttggagtagagaatttggggatgatctggtgttctgtggatgagcacttttcttacagcttggtggtaaatggtgcagactttggagccacactacctggactcaggtcctagctgtactgcctaccggctgtgtggcctaggtcaaggtatttaccgctctgtgcttcagtttcctcacctgtaaaatggggatgatatttatacaacctcataaagttgttgtgagaagacaaccttggtaaaatgaacaacattggtaaatgcttagaatgctggacactggaaattatgaaatgctagttattacaactccaatgagtaggtggcgagctaggtagagagggaaggctcagctactttcagatgggaaacttgactttagttttaattcagcagagcaaggacacttagaatgtgcttgggtatcctctagacaagaaaagacttcattgagagctgaagaatagtcccgaaaattgatttttcccatatattattttttaatgtttttaaattttgggcctgccattagctagcttctaaggatttgaagctttgcctcagtcttctcatctatcatgtgggtttaatgttacttctctgcagcatgagatagtagtgatgtgaacagtgaactagaagtcaatagacaacttacagcctcaggcctgctactgcataaccttactaccttggcagaagacttaacttttaacggggcaaggtctctgtctactctttaaggttatcttgagaaccggatgagataatatttgcagtgttattttgaatactctaaaactctatagtaaatgttagggaacttctaataataccacctaacaaagttattgcaaagacgagatgatataatagatatgaaaagactgaaggaagccggatgtgctctatgaacctatgggatgtgctctatgaacctatgggacatgatgcaggttcagccctttaacctcctgttcccctgagtgtgagtcctaacccttcccaagacacagaggcctaggggaacctcaggctccctggattcttagttccaaggagttttaccctttcattcaacccatgtggcattaatatggtttataatatactatttgaccacatccttaggaaaaaaataaggccttcccttgtaatttccttattgtttgtttattgggtgcaagactgtgttttatctccatcatttaatggaagctacactttctgctctaatgttagtaactcaacatttgctttttacaatttacaatttggcagtgattctttgaaataatttacttttatcatcttgcttcagattttcaaagaataatccatctagcaaaacagttttatcctttctatatattcatttttgttttgaggctctttagcagaattaatgatttttaatcaaatttctaggccactcatcataattaggtttagaattatgaattatgtacagcttgccattatatcatacctccttgtggtaggtgagtgaattagagatcatcacaggatttccagagcctttcagaatgatttatgacataaaaaaatcttcaattttttcttccttgtttaaaatgtctctagaaaaatctgttttttttctgcctctttcttttaccctctacctgaaagtactgttgcttgtcagttttccctccaaatcatttggcctctgaaaaattttgcatagctaagttttaaatgaattaatcaaaattgaatctcaaaaacatgctgggtgaaataagtcatacacaagagtatttactgtatgattccatttacatgacactctagaactaatctggggtgatagaaagcagaataatagtttgttctggagagagccacaggataactttgtgggacagtggcaagttagaaatgttctagatctgaatggaggtagttctatgggtatatgcacttgtcaaaactgatcacgttgtatacttaagatctgtgcatttcattatgcaagtatatctcaataaaaaatatgaaaaaattaatcatgactcactggttctttacatatattattttagacacacttctatggtgattaaaatctatggaattcttgaggtgatatgatgtgttttccttgtatatttttagccagaatttaaagaaaaggatgttatcttaccataccagttcttctgaatcactggaggtttagaaaaaatttgtttgtcagctctgttgtccaatgatattcaagtgagtacctgccgtctgggttagcttttataggaagccattactcattctaaaaatgttcccttctcctgccatttgacttatatggaggaataatttcttggctaattttttttttgctttatacttctgaaatacaaattcactttttctaatgaatcattatcatgtactaccatcaaaggttattcactgaaagctgaagaaaaaagcaatgaaaactaattttgattgttaatggaaatgtatttttagtcctaaagagcttccctcagcaataattatagttatgcctcttgggtgtttttggacttttaaatttacgtctagtagctctttttcatttagtagttaatcttttaacagagctctgcaaatttgttctttagtctggcgttagaaaaggattgacagagattttatttcttctcttctattcaattttttcccctcctcatcgtgctggcagcccaggctactccccttattgggcaaccctggaccctgtgactagtcatatgggcagtgagggatcaggatggaaaggctagagagggagattttgcttttctgcagccagtggccacccatggctctgtgagccacctctgctccacacagcacagaattgtggcacagcaagtgggctcatcaaaggtgtttgtgggagatgggcaacactcagctttgtggcctacaactctggaatacacactcagcctgtaaggggactggctggctgctgcctttccctggcttcagacatccaagtacctgtaggcatgtggggagcttgcaaacaacaagatgtaaagctttggtagcaatgaagattgcttgttggttttgctgcttctttgctgatttcagagagaggcatgggcagctgagagggcatgagaagcgaaggggttctggcaggaagtttgctcaggttttgccctcttattaagaaacagagtacgtcaattaacctggccaacctgattagagaaagtgcaagccactgctgaggatcttgtttctggtgaaaattgacctcacccaggaacggccagacatttgggtatttgcaaagcactgctgaacattaaggaacagttaaaattaatcctgtgtactgcagctcctgagaaagccagcccacatgtcaataaatctagatctgtttgaagctaacgtcactaaatcttcgtcttgactgtttgctggtcgtgtcaagagctgcctgggaagatgaatttgaggggaggatgaaaaaggaactgtattaaactgcagctctgataagtttagttaagaggcaggagatgtgtccttgccatgacattcagtggctgatatttgtttccctttaaataatatgctgtacatctgtgagaatgatggtttggggctggtgacattgcatctccaccaaggttactgccgtctggacaggcagtctctctcctttctttctctatcctgcaccctgtcaataaatatcctcttgtctgagcaagtgagatacagatttttattttttttttgagacggagtctcactctgttgccagactggagtgcagtggtgcaatctcagctcactgcaacctccgcctcctaggttcaagcgattctcctgcctcagcctcctgagtagctgggattacaggcacccgccaccacgcctggctaatttttgtatttttagtagagacagggtttcaccatgttagccagggtggtcgcgatctcttgaccttgtgatctgcccgcctcggcctcccaaagtgctgggattacaggcatgagccaccgcacccagccatgatacagattttacagctaacaccagagcgtcttcatttctagaagcaatgaggttcaacccatgtagacacagtagggaagggtgaggggttagagagaaattaaagtgactggaggaagctgttttggttgtgaaactgtcaaaggaaccccaaagcacccagtgggaaggtactgacactttaagaatttatccctaaaaaccccatttttacaagcaagatatatgaaatctggggactcaggatttagggttctgttttctcctgtgattcccctttctaggtgctttggtccttgctgtgatttgcagacctatgatctttggaagcagtcagcaaactttctctgtaaagggccaaatagtagctatttttggctttgggtccatatagtctctgttgcaactattcaagtctgctgtagtgtaaatgcagtcacagtccattgtaaatgaatgggcatgtctgtgttatggacaccaaaatttgaatttcatataattccccaggtcacaaaatattattcctcttttgattttttttaaccatttaaaaatataaaaactatccttagcttgcaggctgtacaaattagatggtgggctagattgggcccatgagctttagtttgcttacctctggtctatgatttgctctgtcttgttattttccttttgtcattgtgaggtgttggctgtcgtcttggtaggaggatgaggacaccctaaagattaagttcatggcctattcaacaaggagacagagtggatgggaatgaagacaatgctgggctctgaggcagacagtccaggttcccacaccaatcccccattaacacttcctagctgtgtaacctcaggttggtcacttaacctctctgagctcctgtttcctttttctttttatgaaatgggggtaattatattttcactgtctgtattacatgactatactatagcccaagtagtcaagagataggagaatgcctagtaaacgttgtcattatatgaatgtaaggctttgggattatttgcactgcttcaccaatgcagactcttattaactctgattgttactagtattaaagcattatgtcttttgtatttcagctacaaaaacagaatcagaatttgaatggtgtaaagaaaagatactcttgttttttcactttcttagactctgatgttggctgggcattcctgagcctctcccgcttgtttagcgatttctcccagtgtgtccagatgcttggtgtaactgaagggatcacatgcagtttgtgctgtcccactgctcagaaagccccgccctcctctctctctccatcctggctcaccttcaaggcctggctgaagtgccgtctcacccaggatttctccaccagggtccttaacacatgcagctccgtcctgtgtgaatggcttgaccccacccctggcacacaccttatagaaaggacatcctgtcctcccaaagatgtacaggttttaagaaaaagggtaaaggcaaataatggaggtcacaggtaaggcaagcaggatgtcttctggccaagttgagtgcccctgaaatcactgaatgttgcccaatgggagaaggattcagatatgaagggatgggggtctagagaacttgttttctgtgacagtgttccatctatgtcatctgttacacttctagaacattttcacatccactagctctttgatcctataacaagtctttgaggcacagggaacattttaatccccatttgaccctgaggaacagaggcccagagaagctaatttacctgtctttgcatcatacagatggttaataatgaagttgagactggagcctagttctggttaccatgctgcaccccatggccaaccccagcctgatacaggcccatattgctgccatatgtgatattccgtcttgagggtgagggcacatttctatatggatatatcaaactagctgtctttgagtatgttagctcgtcttatctttccatcccagaatgcatttgtggagcaggtttttgagcaagagagcctgttatcacgtattttcagcttcttctattccggtcatacctgcattatgtaaatatgtatacacagagtgtttgcttatttattcggtctgtggtgggaaaaccaagtgcattactgattcctgggctgtgcttttcagcctaaacactttctgcagctcctcattgctcacttaatgaagtgtgaactcttcaggttggcttttaggttctccgtaatctggttcctgcctgtcttccccatctccccttccatctcaggggaagccatctgcctcttcttgatccaggctcgcttttctgtcctgtctcctctgtcatctagaactttgatccaccactcctctttttcatgtgtcttcaactctccctctccaaagataatttcctgtgaatctgtcatactctatgtgctttctctactcttaaacacatccttgatcctaactgtcccttacactattgtcctctcccctcttgctgcttcgtttatatgaaccagcctttctcacctggggctgtgggtgataactaagctctgatgtcctaaggaagggacaaactgtcacctgaaagccacatgtggccaccatctttttttgtagggcttgtgggctaagaatggtttatatattttttgaaggttgaaaaaaaataattcttgacatatgaaaaatagataaaattcatatttcagtgtccacaaataaagttttattggaacacagctgggcccattcattttggtattgcctgtgactgctttggcactacagaagcaaagtgtagtagttgctgcagagaccagatggctctttgtagaaaaaggcattgattgtgtataatgaattgatttctctgcatttagaaacatgtgttatgtacgacatttgggagaattaagaagtgagtcacaggaatcacattctgtgattcagatgaggaaaccccattgcaaaagactgactctctcccttattccttagacctttgttgtccggattctggaacaagcccttctctactggaatatgtcctttggagctctcccatgacttctcagtcaccgcatctggtgggcgcttctaggtcttatcattccatcctctctgcagcacctcccactgttgaccagcttctacttctgaaattctctgttctgtctgcttagaccttgtgatctctccttgctgtctcatcctttgtctactctccccattcactgtttctttgtgtctcatctttagcaaactcccccctttcttgtagagtgcttgtagcaaaattgtgatatttacccctgtctccatgccgatgatttccagttcactgtctccccagctctgtcccactttccggggcatcatcttctctttgctgctcttctcgtgttcacttctctttggtccctcacacccctttgttctctgttgtcataagatttagaatctcagttatctgtgatgtatctcctcaactccaaatagtttatcagttgcttaatctgtgaggatattttcagcatccattcccatctccctagtccgaccactccttcagctctttcttatctttctctttcccaggctagccaatgaccatttcccctagctgttccccttcttccctgctgtgcagtcaggctgccacctgactctagcagacactttaggggcccccattacatctccttggctcacctctggtttcagtgacagctcccatgcagagtttcgcatgggcttagtttcctgctgatggtgtctcacaagttactgcaagagtctgtcttctttctgccccaggaccttcccaggagccaaatgagcctgtgcataagttcagtgtagcctgcaagtgcaattgagccagtgcctccatcaggggtaacctgcaactgatgggggactaaagctgatggattgctgcccagcctcttacctttcatgcaggcagctctgggaggcctccgtatgcttcttgggcctactggaggaggagtcatgcccattgccaagagcagcaaccttgataatgcaccctgatgttggattttcctcctcccctccctttcctgctctcttgggtcatctcccaaataagcttcctgcccccgtgtcctctcaggctccactttcagtagcattcaaaccaagacacagaccagtcttctaaaagcttctgcccagacatcttcagtggcttcacaagctccccaatatcggactgattgtgttttaaaatcctaggctccctgggtttgtttgatatcagcttatcttactaattttatcttcccctactcacctttaccctttgttttcatcaaaccaggttccttaagggcagagattgtgtcttattcatctttgtttctccatttgctcaatatccaagatctgaggaaactgaaggcaaatgtatatttttagtgagcaaattaatgaatgagtgaattgaatgtattcatcttcacatgtgcatccattgaggcattcctcctcctcattgcttagtagtgatcttcacctccactaacttgacaaagcaccccatctctaccactgtacggtacttttaaatttctactttatgtttttttacgtgtcttaacttctaatatataaattccttgagagaagcgatgttgctttattttctttatatttccccacagatcttatgggtacatggttccttaataaatgttggttgaaagactgagagaacatctcattatgtttccagacattctggggccttctgattcgttctattctctctctctctctttttttttttaatttttgagacgatggaatctcgctctgtagcccaggctggagtgcagtggtatgatcttggctcactgcaacctccatctcctgggttcaagcgattctcctgcctcagcctcccgcgtagctgggactacagttgtgtgccaccatgcctggttaatttttttgtatttttagtagagatggggtttcactatgttggccagggtggtctcaaactcctgacctcgtgatccgcctgcctcaacctcccaaagtggtgggattacaggtgtgagccactgtgcctggctgatttgttctattctctgttctccaaacatgttacatgttttctcgttcccatgaattgaagctatttatttctcctttgctttttatacatgcttcttacagtatttgcctgtttacctataaaaattctattcttccttcaagtccaagcttaaatgccatctttttcataaagcttttcccaatccaccctgttaaatcatcacctcttctgcaacacacgcctgttatacatttgtattattctgctttatgtagcataattttatgtggcttgtcttctctccttcttagagacaataagtgtattcagggcaaggctggttatgtcctcattgaatccagtaccttgctcaatgccctgcaatcaataaatatctgttggaatgaattaatttgaataggttaaataatataatcatgcttttgcatgcacatcaccttaactggtgcccctgacctatttttggtgcatgtccttgagtttcattttggtaatggaagaaatatcaagcagaagaaaagataaatacccagagctggtcaacatgatctactgtgtttgaacaggaatattggaacataacttctaagaatgccatttcaattatttgtaaaatatttaaatagtataatccaatttacattctatcatttctaacagctgtaaaatttactttacaccaaagttagctcaatcactttaattcagtctggaaaaacagtacaaatgaaagcttaatttgtatttaatctcctcttttgtttctacattattgccttcgaatcattccttttagtgattgagatttaaaccagagagaggaaaaaagcttgatgaaatatttgagaagaatataagccataatgaaaagtatgaagtcaatgttttaaaattccaactggctttgttctttggggtttcaattcatggcaatgtttttgtggtaaacctgaggtatgagatatgtgggttactttgtcagaatcacagggctataactctcaggtatttaaaactaggtgattcatttggagcaggttacatttatactctgtatatgaagattggcagggaatacaaaagtgcataattattatttagtgtgttgatcatactcgtatatttccaaatggctttatgatcattttggttagtttttctctctaagctctggcagtcttccagctaatgtcatcagcggggaacagcagcaaggagaggtggcagaattgtgactacctatggctttcctgtcactgtatagtatcaggtctgatgtggggttgggtggaggaagattccaggtaagggtagaatggccaaatgatgtgctacttcttaggatgaaacagccttctcttatttctctgttttccaggtggtggcatttatagaagtgttccagaggcccacacctgtccttacctgagcccttcttcttcatccctatacttaccacatcccaccctcacccccagcaaacctctttgaactcaagaggtggtagattgaaagaggcttcaatgaagggtacatatgccttagacttaattctgatcaataaatgtaagttaattaagtaaaagtcgggggaaagaaggggcttcaagctcatttatagccaagaagagttagagaagaccatagcattttacactttagaaagatgatttcagaagaagggatatgatgtgatgggccaagagtctaaaatgaaaaatagctaaagaggaattttcaacagtgccatcacattctcagaaaagaagaaaagggccaggcatctagacacctgtgtaactacatgggataaaattttaaaatggggcagaattgttacagaaatactgagttacacttaataagcacatttctctttgttatatcagctattctttatagcagctctgtgattttggtccaacatggagtagtgaccctacttcgtgaatgaggaaactgaggcccaaggattttagggacttgcctaaagtcacagtgctaataaaaggcagaattaagtttcaagagacctaggtattatggctccatagtgtagtgatgtttctacaatactatgctgtaaactgttggcaacatttttaacagggctgtcagaagatcaaagccacccagtgagctgaggtttataaaatatatacatctcccaaatatataatagtatatactaatgacagaggataagtcacagaagatgaggtcctctgctccactcactggaatgaatggaaagaagcacaacaacttaagttacattttggcttccaccttttctatcaattcagttcagtgagcctaaggccatccaagtgccacatctgtgtgtgcacatgcagataggcagggaatataatcatgagcaattattcagtctcagggccacatcgtcctagaagctcttgcatgccaatatcaatcacttagccatccaccagcccctggataatggtaacatgcacagggtagctgccagtattccctttaccatggccagcagcttgtgtgttctagagagagatagaagagtggtggttaccctagccaggcagttaagcataatgcagtgacaggagttactacctcatctctgaactgcttcctgctaattttggtgagacttttcaaggtatagactatacagaagtgagactgttccctctgggagctgctggtttagtgaagaagacagaaaacacatcagcggtagaatcagtgactgaggagtttggagaaggatgagaggcttcttccttatggggaaagatgacaaggccatttggccatttctttccttttctgtttttctttttcttttttttttgagacgcagattcactcttgttgcccaggatggagtgcaatggcatgatcttggctcactgcaacctccgcctcccgggttcaagcgattctcctgcctcagcctccaagtagctgggattacaggcatgcgccaccatgcccagctaattttttgcatttagtagagacggggtttcactatgttggtcaggctggtctcgaactcctgacctcaggtgatccacctgcctcagccttccaaagtgctgggattacaggcgtgagccacggtgcccagccagccatttctttttaaagaaagagaaaggtctaattggatagtagtgattggaccatggtggtaagatatgaggcctgattggaaagcagtgattggactctgttgggaagacatgagacctgatttgacagcattgattggaccctggtggtaaaacatgaggcctgattggagagtagtattggaccctggtggtaggatatgaggcctgattggagagcggtgattggaccctggtggcaagacatgcggactgattggagagcagtgattggatcctggtggtaggacatgaggcctgattgtagatcagtgattggaccctggtgggaggatatgagacctgactggggaacactgattggaccctggtgggaggacatcaggcctgattggagggcagtgattggacctggtagcaggacacatggcatgaagagaagcaggtgcagctgaggctgcagtcagcctgaagagtgtcctggggagctggctaaggaattggaatccttcttggggaggcagtgaaagttgatttgcttattttaagcaggaagtgatatgcttagatttatattttagaaatgtcacttgagggagtgatttagaacaatagactggaagggagaaaaggctggagaaggggacagtagtggaagccagtgtagaaattcagaagagagagacagaaagagaaggagagaggccctcgcgggagctatcttaaggtagatgcaggcataagaaaaaaatcgaaagaaaaatatcccaataacaaacacaaaaccccgacaaacacacagagtacctggtagacttctgcataagaggttacggagtcccaggtcctagtctagaactttctattcatgggcctgatatatagcccagggatctgcattttgataatctcccaggggcttctggtgcaggacgctagagctcttgaagttctcccttggttctgaccttcagcaaaagtaactcctcccttcatgtccttttctatgagactttcccagggggcctcatgacataacaagattcaataactacgattaagtgcttccttagtgtttggcattttgtgaagcactttaacaccagcccttttcatgagtgcctccgtgcttctcagactttaaagtgcatcatcagctgtgccccacccccaggatttctcattcaggaggtctggggcggagtgtgaaaatttgcttttctaacaagttcctacagagctgctgctggcccaccagccacattttagaacccctgctgtccaccactcataggaggggcagggattgttgtctgtatatggctcaggaaaccagagacttggctaggataagtaattttcccagagtggtagagttgcagctagaacctgtctgcctgaatctccagttcatattcttcaccacagtctcagcctttcatgatgcatgaccaggattggtggaacccattctctgctgggcttacgtcccctttccttaatgagctaaactgactttgttactgctttcttgaagtcttcctggaatcctctgccatgagttggcctcgtctgtgggcagtggaggtgtctgccttccagcagtgatttaagcatcctccaaagcatcttcccgaactgaaataccagagctgacatagtctctcaattcccaccaatacagttacccttttagttaaggctctgtctccaggttgtttcttagattgcgtgtgagctcctgggtggcatggatcacactgtatttgtgtttgtagctccacacctaatgcagtgctggactcattctaaacgggcagtaaattgagtagaacatgagtgaatgaaatatgttacttgtagggtataatagttggacctattaacctagtctaacaggcaaactagcttagaggataataggatgggtacattttgaatacctggaggtagttagtataaaaatgtgccaccttccttagtaaaagcaaaactcagaaccttccacagatagtgagactctcttgaaggggaggggctgatgggactcctgtcccaattttcctgtgatcattgctaatcgcattggtaccagggataagctgttttctcactctatccttagcacaaatgaagcagactggaacctttctcggggatgacacagggatgtcaagatgaaatcggaggagttcccttatccccctcacagggcatgcaacaggggtgtggctcgcttctttgatgccctgctgctgaaaccccttggggaagcatgcagacgggcaggtcatgaagagtgtttttggactccgaccccacagcagggtctagggttgaatgtttacagctcttgaagccccagtggcgtatgttacagtgtattctttcagttttgctgtctgcaggtggcttgtgttaatcagctcaattagaccctctggcttatcccaaggacagagggctttttgcatcccgtgttcttgccctagggtactggaaaaatcagattacatgtgggattggaggattggtgcaaggttttattgagtggtagaagtagctctcggtgaggtggatgggtgcaaagttttattgagtggtagaagtagctctcagtgaggtggatggggagccagaaggggggcatggagtgggaaggtggtcttcccctggggtagggccacccaacagctggactctcctcagaccgtcactgactgcccctgactgaattctgcgtcatcccgcctcaaaggccttgtggtgtctgctggtgtctgttggtgtgctcttctgctcctcttgatgtctagctgattgtgtctgtgcctgctagggtcttgggtttttatgagcacaggattgggggcatggtgggccagagtggtcttggaaaatgcaacatttgggtgtaaaaacaggagtgcctgttctcacttagatccatgggtacaagcccaagggtgaaaccctcaccagggaccccacccttctctacccagcacttccctgccccctcctgtatcaaagacggtaccaggagtgtagtctggctggcttccagggccccaggtgttctcctgctgacttgaccagccacctctcagagctctggagactgtcatctctgtctcaggtcatctgggcccttgcttagtggttcctgcttctatgcagtgggtgcgttccttaattcccagctccaggagcaccctcctagatacttggccccttccaaactcaggccaacggagacgtttctttcacttacctaggtctgctgtcttggacattgcttctcatccagagacacatctgttccccaggtgactctgacagacatagccttactcttcaaccgatctcacaatcccctgcccaccatcacaatatcctaatgcagtagcggtgtcagtcttataacttgagtgatgcagggtggtggcggcgtgaggagtgggctggcattttctcacaaggggcagcgaggcccagagtgtaaggaccacaggggtgaagcaggagaaggatcggacctcccgaacactcaattggctgctgcagaattttgcttccattagccctgcgtacctttgcccttagaaactctctcttcccaccaccaggttcctaccacacaattagagtagacactctttaatttccaaccgccttgagccctggaatctgcatcagcagtctggcattagccatggtcatttaccgcctcagattctaaataacatggtttgtgctgatggaaaatgccggccaggtccctatagatgtcactgcttgttgttgcgctgatgtatacatgcctatttctactggaatataaggtctgggggaagggaagagactgggatgaggctgagggcaagtgacctctcatcctttgttggtagttttcacaccaggatttggggtttgggttccttggggtcttatgaaaagccattgaggttgggaattttgcagggaggtgttttatttacctttcccctgcttggtgattctcagctctgaatgtacctttctgtatccacataccttgtggatttactttttccatttcttggaatgatgcaaaatgcctgggttatgacgaacatgggactgtattttctatatttcctttactgagtatcagaaagttatttgaactcacaacttgtttgccattcatgcttataatttcctggtatgattagcttcttctacacatgtgatccttaagaggaaaataaaatttccatgatgttagcaatattctcgtagatttatgcagtaggtataatatttaagctaattttataatgttttaaaaaaatcattgctgtttgtcggcctgattcctttgtttgcgtgtcatcagtgtccaatgagtagtatgtgtttcttccagtcattgttaaaacccaatatatggaaacagtgtttataccagcagctgttacaaatctggggctatggattaatgtcagtttctgaatgtagagtgctttagttaattccacccaaggacagatgatatcatctaggaagaaggaatatattagaaactgtcagccagaaggtagtaaaaggaggtgatatgttataaggagtactaaaaggtcattcaaagaagagatattgctaataactcaattaaaattttcacgctaacattttacaaatttctgtgtaagccctaaaacattttcaaagctagctaaattcataccatagattggaaaaacaggggtcaaataggattcacacaattcctttgtgagatgaacaaattgggataatctccttttccaggaagttctggcaagctaattcattgaaactcccttgatatctaggtgagagggtgggattttgtaagtacacactttcactggggattttctgttttctgtgttacactttggggcagggcaacccactcatttggtccttgactctcaggaaaccggtatttgctaagctggtgcatcactgcagttatgctctgtattttgctgcctggaaaacaaaaggatccatgttcttcctgcaagccaagaggcaaaacaaaaagtggagataaaggccgttagtggagcctgtacttggtgtaggagtacttccagactgtatgatgggataggaccaccatgctgcacagtcgggcagccaggacaggaaacgcaggaacagcaggttcatgagaggtcatctgaccatctgcctactctcctgtttgggaggaatgatactttcttgaagatgttcttacctggagtccacctggcttctcttagtagctctttctagtgttcagtcactgttaaggttcattcagttcttctcctgtccagtgaatataagcagatttctcttcttgctaatttttcccatagtcatggagaggaagtggtcagtatgtatggatacacatacatacatatttagcaatggctgtagctgcctccggtgtgctggtgctacagatttgatggtaaggaaaagtaaaggtggctgctgccctcctggagctcaccatctagcagaggtgaaggtcattaattataaaatcactcacataaacagatgtaaagtcacaatagggataatgaggcaggagaataagatctggaggcagggaacctaacgccgattcacgctgacttcctagaactgaatcaaaaggaaagccccaactttccacactaagtaacaaaaggacgagaggctactccctttgcaaatctctcccccccactacccctacttttctgcatggcagatggaaaattgaaagtacctctgattgatggctttttgcaaccaatcagacgtttgcataggagtgtaactttgtaacttcactttagcctctgattcgttgctttccacaaccagtgagactgattgcaggccaccacttcatttgcatggggtgaacaccaagtggccaatgagaaacctctaggaggaatttggacccccaaaagattctgtaaccagggcccttgagcctctgctcatcccactcctaccctgtggagtgtactttcattttcaataaatttctgcttttgtttgcttcattctttccttaccttgctgcgcattttgtccaattctttgtccaaacttccaagaacctagacaacttgcagtcaagaccctctcctggtaacaacaggggctaaggtttcagaaaaaggatatggtgttgtggtgggaccttgtttgaccgatggaggtctggattttcctgatgaagtgttggctcacctgggagctgaagggtgcagagttaactagaggaaaagaggagagggaagagcatcacaggcagagggcacagcaagtgcaaagcctcttgactggagggagtttggtgattatgaggaggaaccgaaaagaggcctgagtggttgttgaaggaagacgggcaaaactgaacctggggaggcgagcagggtcagttaatggaaggcctcacaggtggtggccaggaatcttattttttttaaatgtgaaataattatggaggttgtattcactgcaagccaaactcaaacttcttcttctcactgtaatataatcatagttcctttcctcttcaattctggggacctatattggaactttcagctgaggatttcaaactgaatttctttgttttttgaaattccttctgcaaaggtgtttggcatagaaatgaggacagcagctatagagcacctaaaattttctacaggtatctcaagatggagtgtcttaagagtcagaaattgtgacatgcatgaaaagataaagatatatgtcttttctatgtagcatgtacacaggaggcacttaataaatgcttgctgatgaatcagaggtgacatccagctctcaggaatgcaaaacaatgttttctgttttccagctatctgaacgttgctaacagagggcctggggaggagggacgggcacgaccgcatctgctcctctgtcctgtgtgcgtgtttggccacctgatgccaactccatgatggcacatttgtcttattaagtgtaagccaattcctctcccccttccagggccctcctgatggtggctgtggaggacagggatatgctgtgaaagcccagttattatggtctgtaaagggaggtggtggctgctggggaatgatcaaatgaagacaaatgcattgttaagtttttatggaccaaggccgcactttcattaagcgtaatttacataacataactgatgctcaaggccaaacagtccttgtgccccagtgacagtccctgacaacccatggaccgaggcctcatgcacaatcccccaggtcaggaaacctcctccttctccttgctagctcagcacgctggttgctccagtgctctcattttgacctctcaagccaaatgctgatgacatcaaagctacccattctactaccgattagcagtaaaaccatcgggcactctctgggcagagttcaggtgctatgttccttcctcttttcccacaggagttggcttcctggtctgaaccctccataagccctggctgggaattttcctcactgtgaccttgtgagcagtccctggttaccctcaaggattgtgccaagcaggctctgggttaacatcttggagagtacagagtaggctgataatcagcctatgctcaacagcacacccaagagttgaagatttctgatggcatccctggggtgctcagcagtggcctttgtctgcacccatcttcattacatgttaataccaccagagacactttgaggtcagccttttcaccttgcacggcaaagcaattatcatttcctttcattgcaggggtgggcgttggttatcacatgatggatttttgctggtaatcagaactttctgcccattggtcttcaagacatacttttgtgttgacatttacaaggtatgtgtcaggcagagccgaggtactgagtgagggaatgaaaggaggaggggggagaggatcattatattcaatttaatgacgacaatttccctacatttacaacttccagaagtaagagacaatagatgtgtgtcttctgcttgcatgtacaatgaaggagatgacatgaggagattctgttagtgggaatggtgatatattaccttaatgatttcattgcttgccaaataaaagaaaaattctcactgtagtgcaaagccctgtcctcatcaagctattcattgtgaggcgtttgttgttaaatcggaggcataaggaggggttttgaccttccataagctgcttttgaatttttatttttttcttggctaaattgatggtctgttttctttttttagtagacatacgtgaacatttgtatattgaatattgaagtttgttaatagatttgaagagctcttagatttttttggcaggtgggtgttgaattaatggaatgtttcacaatagagttcaatgaaagctcccctccactattatgctagtgtttggaagggcaggcgactttgtgtgtgtgtgtgtgtgtgtgtgtgtgtgtgtgtgtgtgtgtgtgtaggggaggggatgttttcatgtgagctgtggataaactgaacaaatttaattaaggtctaaactgaagtaggatcccatagtctaggtaggatccaagggactattttctcagggctgctggaggttggataatctgaattatagacaaggaggagtccaaagtcttagttcaaggatggcaccaagtgacaagtcctgtgatctagcagaagcagatggagaactaagaagaagatcagaaactaagatgacttggagccaactagaatgagatcatggatagacagccttgtaggctagacctagggacaggagaattagagtcttctggatttccttattacatgaacctgacagtggctgtttaaagaagcaatgcagggcctgacagtaactccttgcttggcttctgcttactctgtgtagtctgctttttctagtaggttatccagatttccaaagtggtggagtcaggtttgcatggtagagcttgggaactgaaggggaccattgtggtcatggaagtcatgagcatcattttccagtttagaagactgaggcctagggaggacagcagttgggcaggcccaacgaaaaatccagtttaggaggtccggggaggatagcagttcaggaggcctggggagaactccagtccaggaggcccggggaggacagcagttcaggaggcccagggagcactgcagttcaggaggcctggggagaactccagttcaggaggccgggggaggacagcagttcaggaggccagagaatgacagcagttcaggaggctgggggatgacagtagttcgggaggcctgggaaggacagcagttcaggaggccaggggaggacagcaggcatacccaaggcctctcaggcattgctgtgcttcctcaccctgcaatgctgccgccacatcctgttgctctctgtttgtttgattggagtggctctcctgaagctgggctgtttgcatgcttggtaggcccccttcctgaatgtgccagccagctctggagccctactcagtaactgtttcggatgtgatcctcatcagatatatttctacctactagttgtgtgactttgggcaagcctcttcacttctccaggtctcagcttttcgtaagtaaaatgttgcaaggtctctgtggaccctttcagcttaagcatgacatgttctgtaactaaggaggcccagttatagaagctcctggtgtagctgacaatgtgaatacagtcaatctcaggaatctgtggaaatggaagtgatggcttatactttggctcttcacccacctgaaagatcacgtagaggagttctctaggctgcaagctccttgaggccaggggccatgtgtcattcatttttacacatccaaagccatcaggctgtgtggtgaattgtgatgtttagtaaattgggactgactgaatatgaagtattacagaatttcagatgataagacatacttaacatagacattgcataagcataacacatgtgcctaggacatgcctcctcaaaagtgctcgctgagctccattgcagcagggaccacacctgtcttatttaccactaggtctcaagttccttgagcatgactaggcacatagaagttgtttggtatgtttgctgaatagatgaatgaataaagatatgacatgaaagaagcgtagttgaactttccaaggttatttggattatttggtgagagaatataaacctggaaaagagaagaaagtaggaaacttggtggcaatacacctagttttgctttccttccacccctaagctgtggctgaaatctcttgtacataacagaaagtgacaaccagcagccccatcttctagttgacattggtctgcagatggtttctagtgtatgactaggtaagtatagaaacagagcatatacattaggaaacttttacagaaattggacactgcatgacacccaagcatgtgattgctggatttgtttggctgaacagtgtatggaccagtttgtatattgctaaagtcataaatgaattgcacatggtgtatactgcacaccagtcctgtatggtaggaccacaaataggtctatgacatatcagggaagaaattatcctgcaccacataactagaaagaaactaggtgaaatccttggttttgtagcctagcagtcatatttttattaaaatattgatgatcttgtttgtcatgtaaagctgtttctgactcatcataatcacatattttctatgttgttgatttgagaaggactgaactagctacaccccctcagtcaaccaagttgagttataatctgtgtgacagtgtttttctctatttaaaactagctagtcttgcatggctatttaactcactcctttggcctcattagtattatcctataatcaaataagctaattaagctgtttcctatccactgatcagagaatattaaagctcggaaggtgactctagctatcctctgctccagctccttcatttttcagagccagttaaggctcagagaggttaagtaaagtgtctcaggtcacacggttatttataaaagaattgggactaaatcgtcagggccctttactcctaggttcttgtgcttttctactttatcctgaagtttaataaaattctttcagattttataacatccaaggtgtgtctctgttgtggtaagttctgggccgctatttgatagatgacctagaatggacagattttgcttgccaaataattatagatggttctacctttaagaaaacttggtatctgaaattatgaacacagggaacgaagaggtgattttatatataagtatatatacatttatacataaatgtaatatttatatataaatatatgatttatgtaaataataacaaaataatatatatgaatgaatttatagaaaaatactggctttggagagatgtggtgactgctattccttatagtctcaaaatgaggataaagctttacataaaattatgtattaatggaaaaataatggaaaaataggatacaaatatattggtacacgcacatttttagaaatgtatctataggagaaaatgagactcttctatgaattaaactagggagtgttgacggaggcctgggtgggtgaatttgtttcccccgaacatcatctctgtcttagcaggcttcagtgtggtctaactgaggtgttggcaaactttgacttgtaagccaaatcctgttgctaccttttttttttgtaaataaagttttattggaacacagctgcacccatttatatactgtcatctgtgactgtctttgagctgcaacttcagatttgtgtcattgtgacatatgctttatggcctgcaaagtctaaatgtttactatctggccctttacagaaaaagcttggtgacctctggtctagatgcatatctggttcatatcactgattctactaccataaggcagggggtcttcatttggaatctcacctagctgagttctgatagggaaggaagaaaatgaactttaatcaccttgctcagaagcctgttttaaaatccagtcaccagctgccggtttttagtttacctatgacctcctggagatcctgagagaatgaaattaaccacctctggaacaaacatccgatctttttattttttccactttcttaagagagtaataaatatagtcaatgactctggattctattactatgtaagagctctttaaaaacatctaaccatctgcttaatggccagtaatacgtttctaatggtcactctcgataagacacttttagttcactcctgtaatcgttgtccaacagccaagaggctcctgaagaatatgaccaaaggccagccccagccccagccctgtagccacagaggcctggcaacagtactgaagaaaaaaagagagagttctgagagctgcatgtggaaactcttttctttctcttgacactctccgcgtatgatgagttcgtgatccacaatagtggatctgaaaacttcgattttttttggcatttacacgttcaggtacagttgcaactagaggtcagtttaattaatatctgtcctttcctctcagatgacatacactgaaccgttgtcactagaaactccacatccctgatctgggcccagcagctggtgacagcttggcaaattatgaatttcctagcttaaaacagcctaaattgcagacaaaacaagccatcagctgagtaaatactgtatctctgtttagcttctgtaagaagaaggagattagcacgaatgtttagtgttcataattactagtaggaagcaaatattaggctcgggctgactggagattatttcattatatccaattaacacccacttgattattcttaattacttctgcatgatgacagaggagtaaagatgtcgtacttcaaatgtacaaataacatctgggccatcaacgtacatgtatttgtaatataatatcctgctcattttgggatggctaatatggtcttagcagagggatggaaaatgaaatgacaagattctggtaattactaagcgggtcttagacaagatgccaaaagtaggtattaggataaaaatgggccttttgtagcaatctagtttagacatgttttctttaaaaatgccttattacctttctgtgtaagaatttctttcttcctctgcccattgactatagtacaaagatataaatggaaatagctaagtgcaaactttccagaaaagagtgagctatatgtgtgtgtgtgtatacatgtatgtcaagtggtatgaatgggaatccctgctccaagggtgtttgtggagttttgagaaactgagacaaaatcagcctgtgtgcgagattcttaatgacctgcctagtaaagaatatgaaatgttagcaagtgatgtaatctcccaagcatgtgcgaaggataaatacagtgagccagattttcaggttcaaacctgaaattagaaccacctttaggaacactagaaatcatctttcctttcacaaggaaaaatatgaacaggtcctttcccttcagctattgtcttgagttagaaggaattgctggtagagcatagccttgctttttggagtagagattattagagtcttaggtttcccctccttgctttcttctggtgttaggggtattgcactgtcagtaacattgcaatggattattattttttttccaggatcaaactttggtattaaatcatgcttaaagatggaggtaactgtgagcagcaagaatggtgagattgggtgattgtgcaattgtgccagcacacgcctagaactggcaacttactaaagatcagagctgaacttggagaggtggcatgtgggtaccaaacaaatccggttgcagctcttgaagtcactcagcagttagttattgagaacttgcttgtgcagagcatcaaaccaggcacatgatgggggtggaatggcccaagccctccccagctggagagacaagaccattctatgatatggttatgtttaattaattgctaaattgcatggttcaaactaagggctatagaggtttggccaagagggctgggctgatcaaagaagaataagactctaagactgggacctgaagggtaggtggattttagctggttagaagatgttctggctattggtgctgtaaaggatggtggaagaaaagcctgttccatgtaagcagaaacatggcccccttatcctctgatgcaacccagctcaggcccaaggactggcgacctcagtagtcctcactgtaagcaaacgcaaagctcacatcttgagatggaagggacattgcaaaaggagagggccccaaggagatggtgttaatgaggattccctggtatctatttccattatgagggaagagacattggaaaatctgtcaaagtcaaaaattcataagtatatttaaagatttaagcctgaaatggaatatcttaggcagtcatttgaattctctctctatatatgtggtggctgatatttaaaaggcacacaaaacattaaaaaattactttgggaatagcatacccttccctgaataataaagaggtaatatcagggaatagagtagtgtcaggatgtaatcagttctcacctgacaaatgatggccagggccagggttattcatctttgctggtgatatatgaagccgatccagggttctcagagttggacagaaggggttgtttggcaggtggtgtgagggtcctgaagttggctggatcttggtagttgtgttcattttgtaggtgtgtatatgtgtgggggtcatgatgatagtgaagaggacctgtaccatgctttacaaaatgcaacaagattgacttggtacacagaggtagaagcttggatgccagctggccatggtatagagctactgtagtgttgtgtcatgtcatgttgcacatggcatgcttggcccacctgagaaaactgccaggaagctgttgaaagtttcttggcctatggctgggtgtggtggttcatgcctataattccagcactttgggaggctgaggtgggcagattacttgacatcaggagttcaagaccagcctagccaacatggtgaaacccatctctactaaaaatatgaaaattagttggccatggtggcatatgcctgtaatcccagctactcgggaggctgaggcaggagaattgccttgaactggggaggcagaggttgcagtgagccaagatcgcaccaccgcactccagcctgggcgacagagctagactcagtctcacaaaaaaaaaaaagaaagaaagaaagaaagtttcctggccatattgtgttgtgtagcgtagtggctggcccacctgagaaaactgccaggaagctgttgagaggtccctgcccttccctgtaggaagaaacaagaatggatttggcttaattactgcagacatgtgtcttatagccccttgctaccacaagtgtagtccatagacctgcagcattggcattttctaggggtttggtagaaattctgattgttgggtcccatcccagttgctgaatcagaatcagcattttcagaggagacctgagggaggggagcagaggagccatcttgatgtctgtggaggtaacagcacacacaaagccttgaggcagaagcttgctggtgactttgcaattgggtgagaaggtcattgtggtgagatggggaagcaaggtactacttcaaaggctgggtcatgggtgacctcaaaggctctggtcaggactttgggttttattgtatattagaggggaagccattgaaaggctttgacataatttgacttgattttagactcctactgatcactctggttggtggatcagagtgtgattgccatgggggtagtgggacatggtcacattctggatgttttagaagaaagagttgaaaggattggctgactggaaataccatgtaagagacagagatgaacaacaggaagagtggaggtgccatttactggcaaggaggggcagatttggggctgagaattaggttctggacatattaaactggagatgcttatcagccatccaaatggagatgtcaagaaggtaactgaattgagaggacccctgtggggaggggtcaggactggagctagaaacttgggagtttctgtcagtatgtaggtgatatttaaagtcatgaggctgaatgagatcacttcattccccaccagatacatgtagggaattagcgtgacagtgatgatcaatgggttttggtgatcatggtggtattgctggaacttaatcagctctaatgtcctctgattccatatagtgcgcttgctcgttatattccttgtctattctcattttgaatgtaattttaatattcatcaattgcagcaaaaggaagaaaatatgttattaactggacccttcagcttctgcctgtctatgccaactccagtgcacactagggaaacctggactccacactgactgggatgtccctgtcaccttgaattggctcagcccagggagctctgggtggcagggccctgaaatcctgccctattgcagcacaaagcaggatggatgagatattccaactcactacttacaggtgttctttaagggagcgcttaggaagttttactcagtttaacttaagacataagtaataccattcccaattcagggcaatggcttagaacctgactcaatgtcctttttactaagtaattatccagatttccttgctaaatgttattttatatattatgtttaatagcctctttcttttggctatggaaggatggtaatagcagccgataatgtatcacatactcatctcaaagttctgcctctggcacctgtggctggagtagagggaagcttgtggtcaggcctcagacaaattccatgtccctactcactggtcctgggttggttcacttctcaggggcctaaggaatcacagataactttttaacctttaaaacattcctcatttttaaagatttgggtaaacctatagagctcatctggccaaactgctcctttgcctcaattcagagcccccatgggacaactgtgggtaatagaaagccctagtagagaggaactgagcagcatagacttttgggcaatggttagatgtcataaatgcatgataaaaattaagccaccactgcatctcaagatagccaattccttttagtaccctgaggctggctttcagtaaaggttcactgggttggactcgtgtgataggaattaggttactgtgttgtttgtacagcgtgtgtttggtagcatgcacatgggcttcttagtgacgacctggtgatgcaaacagtcttccagtagctactggacacctactgtttgccagttgaccccctaaagagttactgagggctcagtgggtgctaggcatatagatgacaccaaaatatttgtcattgatctccatctgccctgaaattatgttctccagatagtcaaggctaaaacccacatcaaaaatatgtatgaaaacctaagagagcagggaatgacattggccattgtatttataaacaggttagacgtatttcctgccctcagagactttccagtctagaagggaagcagagtatatttgcatgaaatgccaaataacagaataatgcttagtattagtttgaaagcggaagtggcagagcttccaggaatcctgaggatgtgtgaaccttttggctacatctcagaatcacctggtgaactgttgaaaactgagatgcctgtgcccagccccagactcattgggcatctgtgtgttgaaaagttccctgggctgggcatagtggctcacacctgtaatcccagcactttgggaggccgaggcgggtggaccttgaggtcaggtgttcaagaccagcctggccacgatggggaaaccccatctctactaaaaatacaaaaattagctgggcgtggtggcatgtgcctgtaatcccagctactcaggaggctgaggcagagagttgcttgaacctaggaggtggaggtggcagtcagccgagatcacaccactgcactccagcctgggtgacagactgactccgtctcacaaaaaaaaaaaaacaaaaaaaaaagaaagaaaagttctctgggtgattctttgtttttttctttttagaacctgataatacttgattttttaattttgttttttatttttccataagttattgggggtacaggtggtatttggttatatgagtcagttctttagtggtgatttgtgagattttggtgcacccatcacctgagcagtatacactgcatcctattgtagtcttttatccctcgtccccctcccactcttccccccaagtccccaaattccattgtatcattcttatgcctttgtgtcatcatagcttagctcccacatatcagtgagaacatacgatgtctggttttcagttcctgagttgcttcactcagaataatagtctccaatctcatccaggtctctgcaaatgccgttaattccttcctttttatggctgattagtattccactgtatacatataccacagtttctttattcacttgttgattgttgggcatttaggttggttccatgattttgcaattgtgaattgtgctgctataaacatgtgtgtgcaagtatcattttcatataatgacttcttttcctctgggtagacacccaatagtgggagaaccaaaagtagatctacccccagtgattctgatacataatgaagctcaagaaccactgctttggaaggatagttggtgtgtgggtgcatgtatggagatgggcattgtagcctggcatgagaaagatgtgagaatgccataagatggggagcactgcaagactgcttggtaccatgcccctttgctgactacacaccagagacaaccagaagatctaagcgtttcagaggcaagaggcaatgaagaggagaaaaccacaattaaaagaaaaaacaacttttagatcatcagtaaacaactgagtgtgctaagtactagtctaagtgttttgtacttacataatcatcatcataaacccacaagttaggtaatactgttttccttactttcagatgagaaactggttaagtaaattaccccaaatcatgtggtttcctggcctggagggtaggatttgtttggatgaaaagtggaaatccagtgggaaagggacagctttcagaagaacttgaagtcctggagaagagattgaattttatcctgaaagccacagggaaatcctgtggttaccaccatcctttatgtgaccttactctcaatagtgagtgtttggactttattcattggatgatgggcagcttttgagccaacaaacaacatggggaaagtggtgttttaaggtgaatctgtcaggtgctgtgtagattcaagtggagggtacctagaaacagattagctaaaactaaaaccatttcctaaaacaccacaaacaacaaaagtgaatattgattgagccctcactatatgccatgtgctgtcctttacatctatcatcttcacaaaaaccctgtgaagtacatactcatcatgtacccattttacaggttaggaaaccaaggtacagagaagtaacttgctgaaggtcacacagctggctagtgtccaagtcaggattcaaattgtgttgcttgattccagaatctaggttactgtctactctgttataggctcttatatctcctaggactttggcagtgataagtggaagtggaaatagagatacatgacataaagagtaaatgtcaggtattacatgatgctggaatagtgtgagcatgcttaggaaatccccagcagggaagagttccttgcacaaagaaattgagtagggtttagaacagcacgtgaaggaaggcagaaggcctttctgaaataagcgggtttatgtttagaacatgggagaagagatagcataggaaattgccattctgatggccctgcatgtactctgataaaaaccatggaagttgtatgagaaatgagtatggtgaagtgagtagatttgttggttttggaatcagacagatgtggttgtgggttccagtccttttcttactaacctgtgacctagggcagtttgcataatctctgcatttcagttttcccatgtgtatattgaggataatagaagcatcatccttattaagatatcataaagattgagttcatgtatggaaaggagatgaaaaatatgacatattccatcaataccagctattactgttatgcttctcgttattacagtcattcatgggtgttaaaacagaataatgagatctctattttggagagagtactttggtgttagtgggtgcaacacaaactcaagagcttctaggtttccagttctggctccacctgctagctatatgatttggggtaattcacttaaccaatttctcatctgaaagcaaggaaaacagtattacctaacttgtgggttgatgatgatgattatgtaaatatgaaacacttagaatagcacttagcacactcagttgtttattgatgatccaaaagttgttgttttttcttttaattgtgattttctcctcttcattgcctcttgcctctgaaacatttagacctcttgttgtccctggtgtgtcacaggggcctgtggcctgtggcctgtggtgttgcccttgctgaatcctatttaactgttgagaatgtgtctgggtaagtagtcattgctgcctcaaaacatagattcatgagcaaagtgactatgaagatttgatgtgatatgtgggtgatgatcacacataaagggcacagcacataggttacaggaatttcgctgggctgtgaatttctgacatcagcctcctcgtttaatatttatccgccccacttctctcttacttgggacctgtactgaggcatggaccttgttccacaagggactgagagataacagtgctaactctgagagtgtgcatttgtgtgtgtgtgtgtgtgtgtgtgtgtgtgtaagagaatattagtagcctaaagggagatctcatgctgctttgctttgtttcatttttttggttgtaaagttgaataaaaggcacttagtccaaaacttcaaaaaaattgctactgggcaaagtaattttgtgtcaggcttctgttcagggcagatttacactggttataaatctctgaaattaaggtcttaccgtagaaaagctgaaatgtattcaacattagcagacacccagccctgttctgaaccagtggccattcttccgccatgtataatagcaatatctatctatgtgtttgggggcaataataagtttaaatatgcctcttagaatgggtaatggctctccaatgagtagcagaattttctatcaacaattcttttcctagaaccaaaggttaagttcaagagtttgatttaatgacaaagttaattaggcccttaacattacaggtttcttgcctttcattttctaatcaagatcatagtctaaggtcagcaaccttgcagaagtggggaacacaaggccagcacttgttcttctgatgtttggggagggtgactgtaggagatgaggagtgcttagcaatcactgagttgacaaagggcctggagaatgcctgctagacctgaagaatttcattcttacctctaccgaaccttagatataaaatatgcttgagctttaaggaaacttaaggattatctaatcagtcctttcattttacagccagggaaactgaggctaaagggactaagaaatttctcagtggttacatagttcacttgaggcagagtaatggatctcctaagattaaaccacctacttctaatcaaaatgatctatcctcaaatactcatattcaaggaaaagcaaaacctcttcttggcttataggatttatgttgtttatgagctagttttgctaaagcacttcttcctgcctttttttttttttttttttttttgagacggagtctcacgttgttgcccaggctgtagtgcagtggcacaatctcggctcactgcaacctccacctcccaggttcaagcagttctctgccccagtctcctgagtagctgggattacaggcacccaccaccacgcctggctaatttttttttgtatttttagtagagacggggtttcaccatgtgggccaggctggtcttgaactcctgacctcatgatccatctgccttggcctcccaaagtgctgggattacaggcgtgagccactgcgcctggccttcctactactttttaaagcaaatatattccatttgatcttggaccatgataaaccagtaaagactattggtttgaaacaaagaaattgcctgttgctacttagtccaagaatttaaaaaataataaaaaaagaaggaatccattagaagaaccttagggattctcataactggtcagagattgaaggacctggtaagggaaagggaaagatatcaaagcaggtccagaagttctagaaagaggacacaagacagatttctggaggcagaaacttccgtcccagcatttgacactgctgtatcataaatgaatcctcaccagctctctgtcttcatctcacttgttcctgatgcaaagtccaggtgaggaaatttaaagaattgagccaagggatttgccagtgctttgcctgccgggaaagcagggagaggagaggtatggatgctctagcttctactggaccctgggaacgggcactgcccactgaaaaaaaaaacacacattttggggaatttctcaaaacaagaaaaaaaaagagtccaggttttagattgtcccaaactcaagaaatgtctaagataaaagactttatgggtcattctgaagcttgaccttgctgtatgggaaaatatagtccaaggtacagactaattcatagataactttgggattcaatttacttctgggctcggctattcatgttttaatcttaaataggagtctgctggttcagggccttaaactttaagtgaaagttttgtggtgggatttttggactataatataggtgaccagatttggaaatacccttgaaaatgacgacatttcagaaatagtaaaaccatccatgtgtgtatctttccacacaggtacatgctctatacctggccctatgctgtgcattggttaccaagaagcagacaaaatgttgtgcccttctgcagcctgggcattagtcaggttcatatatagggtgctttgacttctcgcttatagtaaaatattcaaatgcagagaagactattgaagaaggcaagatttttggttacacgccagtacttcaaaagctccaaccctctcaaaaattattagtgtttgcttttccagaagagctgtttctaccaaacttggttcagaatcttcagcaaacatttcttaccagatgcgatgctagaataagtctagccatgaagaaccttataatccagtagaggagacagacatggaaatgaatcatttctatgaaatgcgttaagttctgagacagagatgtgcccagtgtgctacgtaaagacaaagactcacattcttcagatgcgctagcataggaaagttttcctgtagtttgtcttaatcctagaggtacaatgtaaatgcatcttctctgttcacctgtgtggtcagtcatggacagttactgggtggctgttacatgcaaggccagaatgcggggcctgtgatctagcagctaagggcatccattcagctaaagatgtcttcctttctccctttcctttccaaaaatggccaactacaacctcttagatttggggctggagtaggtgggggactgatgaagcatccattcatggctttggtacaggattcgcctaaatctggacatatccccaaagtactagttctgcagggatgaggacagagcccaggagaactgtctttggtttcaccttcctctccaatgtgttcaactcccttgcaggaatgttcttgggggagcactctgcaaatccacatcaggcccagaagagaaatgtttctttgaagacctgtctctattaatttgcatagatatttgtgtatgattttatttacattggtgaggcagaacagtagttctccagctttgatgtgtgtgagccttggagattagagctggggctcttcctttgagaaaacaaatacttttgtgttgatttctatgagatataaatcatacccaggaagtttacagttgagtaagaatggtataattactgattgtataccagaagcggacatatttatgaaaagacttgaaaaagcttgtaatcccttcccgtattttgaataactaattgctatgtcatcctggcatatttgcaccacaagagttaagtctgtcaaatgtttccctctgaaaaccttgttttaagggatttctaacttggtcgtaaaactgtgctccaagttggagctgacttgatgggagtctgtgcttggaaggcttgatttgaatggtgccagtcagagttaaattacaggctgggaaaaaggaaacaaaatttttaaaaaggaggtgtttatggttcccggttcccctaagtacttcttgaggatcaaaatagcctctttaaaataaattgcagaccattagtacatgatggaggaaacccctttgagactagattgggggaggggaaggcaagggcacaagaaaaaagagattgatttgggccactttcagcctgtgcagtgcattgccccccagcccccgcagcatgcccctggaggggttaatgcacacagatggcctttcatgtacccacagttgccatttctgtcagtctaagtggacctcactgcagatccactccaattctgaatcttgattggaatttgggtttcttggaatgtgttcttcctccatgcccacccccccacctttctttttctttttaaacaaatagaacactattgcctgccatcttatgcccttatggatcataaagtcttactgcataggaccttgagtatatcctgtctacgctgaactagagatagctgctggataatcatatttgcagagatttcttcatacttgatgccagacattcaagccaaaaaggtagtccttggctgggagtatttatttgatcccctacgtagagccagcttaggtatctctcccatccatcaacaacagacaattcaagataatgagaaagagagagagggagacagagagggaaagggagatgcaagaggaggaggagaggaggaagaagaggaagagagattgtttctatctctgtgtgagtcaccttgaactccagtggtctgggagtagcctctgtgctctagcacttaccatcaatggaagtgggacagatttatggcctggcatgttcaacctgaattcaaatctccttgtctttttaagatttcactcatgccttaatgacacctttttttttttttaagaaagctaattgcattggtttctccaagaggcatcactttgaacaatccatcctgactgtgaaaacaaatatatgcttgacttatttcatttattttctcccaaaacctaaatgaggataaagccattctggataagaagacatgtgtgtgtctttgtcacatcttttatcatcatgactgcttttccaaataatacaacttgtgacaaatgcgaacattaattacagttaacaaagaaatgtcatgtgaagtattcatggggggagaaaaaagaaccgagacaatcaatgagattacatcttgcaccaagcttcaagtcaaagtgcaaaagtcagaaatcaaataccatcagttatcaaattatgttaatgattctaatgaaagcttctggtattttgttcaagagtgtgttgctgtaatggtaactaatagaacaagagaagctgattgccgcgaattaattagaactgactgctggagtttcctttttatttatttatttaaatattgacaacctgttttagatctcgaggtttttcacgtggtctttttcttcgctccccaagtcatcaacctgccaaggagtgagaatgtaattgtgttttctcatactgtggatatctctcaccagcctcagggttttgacccagactgacagcagacaaattaaactgaagtacccctaacatttggggggttcagtatgagagtccagatgaggccccttgctcaatgctcccttctcttttccttcagccccacattccccccacaagaggcctttgcacacatccacatgggcacccagcttgcccatccaaggtctacccaccaatggctgctctttggctaccccttggccttaggggtgcatgcccgtggcaccatgcactattgagagataggacccagggaagaggtcattgcaggcgctagaaatgcttagggttgtttgagaagtgaattttgggttccgggtaatcataacatggtctactaactggggagtaggctccaggttggaaatgcccttgttccctggacctctttatcccataggggtgggaggggatggaggagggccagagtgggccttctaaagtgcttggccttgggcagggggctctagttacttggatctaaaagcagtaccggacatgcatattctttgctttggggtatctagagctctctcactaaaatctattttattctttctgtttttgtttgtttattcattccttcatttattcaacactcacttggcactgactgtgccaagctctaggacacaggaaaataaggtctctcccttcagggatctcacgggcttttcaaatttgtaatgcattaataaatactagatagagatctgttcaaagttctttgccttccagatctgccttgtattctgtcctctgagtgctgttcttttcttctttatcatggcagcaggtgttacagatcctgtggcagtgaggagggccaacccagggcttagaagaggggactgactctggttcccccgacaaccccccgtgctgctcctttagggctccccaggggcccttcagagctcccaccctctggccagagaaatgtccccactgaatccagatcagaagcagataaatggagagtctggcagggggcatcagtcccacagagaatcttctacagctatagtgaaaacgcccagtctaggaggggccgttctgactgatgactccaggcagcctgaaccaggatccttttgtggagcttctgcctagaaagtgaattgtgttaaaatcaacgtatcttgctctcatattaaaatccctctctctatttaagtcattgagggaatttcctaaattttccaccatggagggaaggttttggttataataccaaatggatattgacagggccttgctcttagaaaactaatcatgacatctgggtaactgagcacaggtcagctctgaagccctccctcctgggtgtcgggaagcacatcagactgtgttgaatttccttcgctggctaaattggtacattagggcaaaaacgatgtccacatttgcatagttgatttcattactattgccattattgatgcctagctcctctgaaagaaaggagccataaaagcaaataaaatcacttcgcgattccattattggataaattaccacattactgcctgcgttttagggctaaagccattccccgcatttgcatagtttatttcattatcattattaataacaacaacaataataatgatgatgactaggatccttgaatgaaaggaactagaaaaatgccagagcctcgagaagtctttatggactcagtgcgatcactaggagtccctttatctgctgctgaaatgcagccactccgttgcattgcaccaaccaaaagcttttaacagagctcccgttaaagcagttcagaacatgtggggccgggtgcctggtttgagatagtgactagttacttgtgcctactaaagatttaggttgggagtccctgcttagcccctaactagttctgtctcttcagggatgttgcttaaattctccaaacttcagcttcttcgcaaatgaaatggggattatgacacttgctctgctgtgtgatgaaaagcaaaagaaatggtgaatgtgaacatgttctatagaccataaaactacccatagattcaagagactaatactaccgtattgaaccttggaatgacggctgtggctgggatgctgtacagtggaggcagtggctagactgtgtctctttggctgggagaattttctaaaaaactaccataggtttctaaggcatcatcctctatgataagtagggagagcatacctgtgtatatttaccaatcttggatatttacaaatagcttactttgatagccagcatttctgggatgagctggtggccctgatagtgttctttcttactcagcaacttctaattatgccttgcttttctccttggtcatagaggcaagaagtataaagtctttttgtctattaattctgaggtcctgtagtgaaagcaaggtccactggtggccgtctatggtttgctggagaattttccccctggttttgtttttattattttattttatttctgctgtaccaggggctccaaaaaaatgaatgtgtcagtaaaggatttgacagtatgttacgacagtcatcaatccactgagccctgtagccataaataagcttcattcgctgccacactaaagaggacagtttttcttctccaggacattgaaaatgtcacagcgagggaattgtttgtccctgtctccacggcaacgccaccagcacttatcattaactttcacaccaagattttaatcagcgctctttgcggcctgagaccaagtcaacatcagcccaaattttcaaagccgttattctaattatgacgagaaagctatagattgatgagccgagttttctgcaaggactggtggcagttaattctcgtgacctgtgtggctcggggagtctctcttagagatggagtcttgaaagttcgattattagtgacagcttgtaagtgagaggagccttatctctccagagagtgttgataacttgagacaaggtttaactaggaagtagtgagacagtggaaggaggggagagagggggagaaagggaaaaaaaagtgcacactctatctgcagcgtgcatccagtgtaatgagaaaatatggacaggcacaatttcacaagttgtaaattctggtagccttcagttgtaaattctggtggaggctgttttactcggctatctgataatgtgtgaaaatatttgtccctttgcttcacaggcatgggcaagcactattttccagaaaatgcattaaacttcccagctctctcctgcctctttttttttttttttttttaaatcatagaccctctaaaaacaaaatgagaatttgtgattgaaatgaaatggtaactgatttttttttaaaaagattctccctaaatcagacctagtgtttgacagaacagtagaatgactatagtttacagtaatctattgtatgttttgaaatagctaaaaaagaataattcaaatgcttctagcataaagaaaagataaatatttaaagtgatgaatatcccaattacatcaatttgatctttaaaaattatatgaatgtatgaaattatcacatgtataccaaaaaaaaaaagagtctgtcaaaatgttaaaaaagactcttccttctcatttccctcagctgcctcccacccccagccttttttgagtcagtctaatttctagagatttggggtttgcaatgaaggggagtagcatggtgctaaccactctgtcccttcctgtttctgttggtctctcgtgttctctgctttcgttaacctggctgatgtatgtccctatgttcttggccatgcatagacaatgttcatgctgttgccatcgtcatgccttcaaacttgctcttgggaagtgggacatttccctctctctgtctaaggcattcagccgagccattagtctgctggggaggaggtgggagtgatggtcactgagtccccctagccaaaggttttttttttcttttttttaaaaatgatctcattatttgttctctagtctcttcctaagggagggtgcagaaaggtagcatggtgaggtcagaagaacctcatcctagatgctcccagtcccagctctcaccccagctccacccctgccacagaggaagactctcccctgcctctgttttctcatctttcaaatggtgatcatagtatctgtccagcctccttcacttatcaaatgagaatataggaatgaaattgctcatacttcatgtgatcattgcattaaagattatggtgcatgtgtgagcactgttggttgtcagcttttttagtttatcttcttttccagaactagaaaaatgatgatgcagttacattttatagtgttttctttttcaaattattttcacatgtttaaaaccagcaccattatctccattagctttattttgcccctgagaacactgaggcacagaaaggtgaggtatcttgcttgtggtcacacagccaattagaggtctaaccaggtatagagctaactgtggcctccgattcccagcttgcacttccctagtctcatgctgcttaccatattaataggctgggattaacgaaaaaagcaaacccaattagtttctgttgcagctcttttacaatcctgtcttgtttccctgtgtgtttatatgtatgttttaatagcattccctgccttttatgctgaggttgctcgaggtatgtttataatggtggcgtaattataataataaaatacaaatccatccacggagtgcgctcattactggctggccaggtaaaacaaacaggcctggcattgatgccgaaacaaggcagtttatttctaatgtggtgcctctttgaaacacaagatgctttacttctctagcaaaggaggccctgtcctctgaacataagtggacttgggggtgcaaggttgaacaggtaattgagacaccggggctaggttgctttaacatggtctggccttttcaatctctctttttccaggggagagttgaaaaccaagaggggaaattgttccctctgattctctgtagctgtaagatctttcctggaatatacaagtaggccctttggcattcaaactcttggacgtaggagtttctaatgtatacgaaagggaaaattattgttgtgaaaagagtcataggagagagagaatgtgtgtgtttttttaaatgcctgtctgtccttgttaattagaagtgcacatattgggaaattaactatgaaatactaaaaatgataaattattccttatttgaaagtataaattaaaggtttagtgtatataaaatttgtcatgtttaattgcaagttcaattaaaattcagggtaatgatgatttatacaggtttctgtgtaatttgatattcattagcttagccagacacatgctgatattagctcgttaattatgtttccttttgttgaaggcagccttgtgaaagcaatctgctcaaagttttctaaactcattctgctaaatgaatatttggcagctgttcatgttattgagatggtcactgtggcttcatttcactcattggccgcatcaatcataccttctctgtgacaaacaagggtttctcattacaaacccatttatgaaggttatggctgacattaaagagtgatggcatggtacgctgctgttactttacagtagcgttagagtggagctgtcgttaatatccacacctcccatgtggtcaacctgtttaaaatacgtaggaagggagggcgaaatcatcacagtggccctggtgccatttccaacaccatcggctcaaacttgggaatcaaaacttgcgtctcagaaggaggactattaagggagcagtgtctcagctccccactgtaggcttcccagggcttgccatacccagttcataggagtagatgttgaggtccagaaaagttaagggattcactcacggtggcatggtggctctgagcatgactcttgggcaggtgaaggggaaagcccaggttgcctgatgaagacgctccctgaagcctgtcatccatggtggtgatgagttggaggaatcaccatctgcctggggaaacagctgtgtaacagtcctgtgccctgcatttttggaggattataaatatttttacagattttccatagcctttattgtagggtcctcatactttacttgggatattgtggaaaggaaggtgctgtctttccaaaaggaaagctttgacaagtaggaaagctgaggcgcagagaagttttttgatttgtccaaagtcactgatgcagatactgactggccagagccagggccctgggcttctctgcacatcatgtgctacagttgtcttccctccaccagcaccttcttgcaggatggaactagacacttggtaaatggtaaaaatgtctctaggctgacccatatattagcttctactcatttgtatagtaataaattggcagtctggtttgtgatggcaaaatgcaatggaaatttcttacaagaagttatcatgtagtatgtctatagttaaatttacatacttgtgcattttttgggaggaagggtttagggactcatatacacatttctttttttctttgagagctgagtcttatgcattgggtctcctttgtaggctgatgtttcttttgaggtcgttgtgaaagagatggctggctagctctccatcgatgtcatcctcttcttccacagtggagcgttgttgctgggactacatcttccacctcctatccccatcttgctccacgtgggatcatgcgatttttgtacccacaggctctacacgcgctctttccccatctgccagttagaggtgaaggactcagaggcataggcaatggcagagtcaaacaaaatagaaggagcctgggcccctgaatcactgtgtggaaagccatgtactgaacatcaagtactgaatatctgattggacttcttatgagcatgacataaacatctattatgtttaaagtccctaaaatttcaggatttatctatcacagcatctagtattaccttaactagtaactaactccttcattcattctacaaatatttgttaaatattttgctctgggccaaatcttgggctaagggttgaggacataaggataaaaaagataaaaagatgctatttctgaccttggggaatgcaatcacatagtaagggagctatacaagtgaaaatattttaccctagtatagtaagtgctgtaaaatgtgtttaagggaggagaacccaaagaagtaatttttttgaaatatctagtgaaatagcagatttaaacttttatatttcagtaggaccttttatttggaatgaaatcatatgtgggatccttcagttcatacaacagaaaaaatctgaagggcctttagtagaaacaggagcctctaggctcatggaacctctctctgcatcctcttggcctgctctgatgtccctgcagccctggatgctgtggcgtatcctctgaaaacccacagagacagattcaagcccaaagatagactgttcttgcactgatgtatttttttttttattctgtaagttgtggtacatggtagctctgttttatagaatgcttatctctaataggtggaagttgagctggtggtaggtgaatagtttattccagaacttttatttggacacattatctatttgacctcgggtaggcttttaaactttttgcctcaatttcttcatatgtaaaacagcgataataatagtgcctatatcctagaatgattatgagaattaaacaagttaatatacataaaggactgtcataagcatgtcatttagtgaatggtcaacagtgttgggtctctgaaacccatgtgttacaaacatatcacatcatatttgtgagtacttctaaattttgatggagtaagcaaaagaatgctggaaacgacttcaatgtgtagggaatgatatcttagtaacaagattctgaaacctccggtagctaatctgtgatttccttttgcttctatgcaccactcaagttcttcttatggttttctgaaacttaggagggactggaatttttcttcatcgtgtttatagagaaatgtatcataggagaaacttgagttgggttttatttctttgacattgatgtttttcatttcacctccactcctttggagacctagacaatgtaacttagaactttttattttctaatttcgccactttatgtcttattaatgcattttgtcagtgtggaaagccctctggtggtcaaagtaattcctatgtggctcttttagatgagttggaataacatcaagttgatgttcaagagctgggttcaaattctatttttctcctttgctcatttctttttctagttaaactataaagtaaattttctattaaacaggtcttctgcagcattttagttctaaaaatgtctagggaaaaatagtggtaggacagttagctttactcaggttaaaatttattagtgatagtattaacattttggagggtttaaatgctgtgccgtccagtattttgctgtcactctaggaatgaaatgtaacatacactctgggttgaagatccttaggactctatgtaatgtaaaggctggaagtgggggacttagaatttatcgtctcatcttctagaaagagaaattggagcaagtgatttgctcaagatgtcagctgggagcaaagccatgcatagaaggcaggtcttctgtgtgtgattcctgtgctcttttagccatgttgcttgaggaatatcatagccaggccaagttcatcaatccctggtctctctaccagataccgaggtggccaggtctcatcaaactcagccataggatacttctgtccaggcaaaattcaactcatatgctttccatgggttctctgtctcttgtttggtgcgagacagggtgcaggattttctttttgtggtttagtgttgggagttgattggttgcgtcaatggagtaatctggcatgaacaatcaccctcagcatatcctcactattaaacagcattttttttttggagaggatgtgcattattctttactgtgtgctggccactgcaactcatcataaagatgaatgactgacaggtgacctatgtctggtgtcctaggagagtagataccttggagatgaagaaacatctgttccactctgacattggcaagaaaagctggcttgtccctccctttcctggtgctattgcatgggcttatattattattattattatttgagtctttggctatgtctaatgtaggctgggccccgaggctatttcttggtgcaccctgtgtgacatggtacaatcacaagaaagctgggaggtggcatggggggagcacagaagatcccctaatgtattctcaatcccagttcctgggcacagacagtgctacctgagagactgaggagctaggggctccagaaaggtagaaattcaggttaattacccagaatcttgtagtgttcctgggtcgttctctggatgtaggtacattttctcaagagactgtttaactctttacatctttgttactgtcctcattgctaaacttcacaagagcaggtaatgctggcgtttatgaaagagtgaacagctaataagataggaattcaattcacatggcttggtctgattcaggagttggggtagtaagttaaatcactcactgttcttcagtgagcatgtatgatttgagtccttatgctgtggctatctactgtgtcagatagaaaataaaatgtagcccctgccttcaaagagcttaaaagtgatttcattttgtgagcacttcctgagtgcctgccacatgcccaggatcctgctgggtgcttgaggctgaataagtccatgctgtcttcagcagaagttgtcggtgaccacctatgccctgtcagtattaccctttctgtgtacattgcccagccagcagcacctgcagctttgccttagagttttctctggtgactgaaccacttttgcttgggacagggaaggtgataaggccagagaagcaggagttggtggattaaaaactctgttatttttcatgggggtgactttgaggcacagtcttttctgtctcccagagctccccagctgcatgaactccagctggacacagtgggaacttgctcaacaatacaccatgcaccattactcatttcccccccttccctttctcatgtccccactctcccactcctagggtcacctccccaaaaatgctttcacctaaatccttcttccatcatctgtttctgaagaaaccagactataatatcttccatgctcttcacatgcctttgattgaagtaaatttctgatgaatgttgcagaggacatgcaaagtgctgaggtaaagaagagaatgggtgacagaatccaaatagaaggatcttggaagccctcttggaagaggttgcatctgaattagaattgtaggggttgggttgggctttgttaggaagttatggaaaggaagggcattccaggctgagagaacagcttctgcaaagacctggaggtgggaggaatatgaggcatatttgcaaaatggtaaatgtctgatatgtctgtagttcagggtacattagggtgggataggggaggtgaggatgagggaatgtaggaagaagaatgtaaggactgtaggtagagttctacttattgatggtttgaatgtgaggctgagacatgtagccttgcctttgtgggcagtggtgggctctcaaggtatcttagcaatggggtagtatgtgtcttttaggatgaagaagcaggaataatatatacacaaaatagaaacatgtcaagtgtgaggctattgcttatcctctaattgctggggaatttcaaactgaggagagacaagtgtgagtattcagagcagccagggagggatcaagtgagaggtagaagttgagtctagtgaatgaatagacggtagttaagagaaggttgaagccaggcatccaggacagaatgtgcaaaggctcagggacaggaataatctagctttagagatgcatcatgactttcatagacgctaggtacatgggcctttctgggtcccttcccacctaaaaaactgctagtagttttttttcttaatgattagattgataaagacaaacatgtataataatattatatattaaaacattttctggctgggtacagtggctcaggcctgtaatcccagcactttgggaggccaaggctggtggatcatgaggtcaggagttggagactagcctggccaatatggtgaaaccccgtctctactaaaaagacaaaaattagtcatgcatggtggcgcgagcctgtagtcccagctacccggggggctgaggcaggagaatcgcttgaaccaagaggcagaggttgcagtgagccaagatcgcgccactgcactccagcctggacgacacagcgagactccgtcttggggggaaaaaaaattcttctgcctgaagttaatttttcttttgactttaaacgaaatgaaaacatttttgtagtctctaaagtctcataggtcatgcgccccgtgtgcctgatagagaagtgagccctgccttttgggagccggatgaatcttcatacctccttgaggctaggctgaggtttccctcacctcttttcgtagagctgcagctttggcattaggagggagccttgggctcacctgccaggccctgagtgagaagctcgagggcacaatgtggggtggccttttaggtatacctggtggccggcatcagggtgcccctggagaggagcaaggggacaggagaacgtcctggagcccctgaaattgggtccggctttctatctgtctaggccacctgagcaggctcccatttgcttattttcccgtatgaatcccttgtgagcttatcctccaaaaggcttgccccgccgtgggggtaagtgaaagcttctctgcctgctgcagcatcaccctccttgagcgtttccactgtcagtgttgctagagaagcaccctcctgtccttctgtgtttcctcggaaatgcttacaaagaagcagaggtttacgaaatgaagtgatatcatccgaaaaaagcctgcgaaaagcaaccatggtgagaagactgcgcaaggatttttttttcctccttcttctcaaaaatagtcaaaacacatgcaacgcatacttgtaaaaggatcaaaaaaggagagaaaattgtagctggcagttgttttccccactgttatttggttgctccttagcttccagctgttgaaatggctagtttatgttaatgggtattttgcctctcctattcgtgttactttactccaaatttaaaaatgaacctgtgactttatttatcccatgtgctgggaaaacagagatgcagccttttctgtctatatgatttgcattgtaaggatgcacttacactgccatataagtacataaaattttcatttttgtgagcagggacatattttgagcctctttttttccagttctttctccaaagttaagaagcataattcaataagtgaatgctgtctcccaatatcagagacccattttctgctgtgatagaagatctattggttcccttttatggatctgaaattgtgattggcatgtcatggtcaagatatcacctagagtacacatccctcagttaactaacctctctcttatccttcttctcaaatgatctttcttgtaaactgggttgaatcatgtgtatttggtttcttaattatagacaaatttctcactggatgaaaagtctgctaattagtgattttaaatgtcatccagatatattagtagacaggtgttattttagaaatacagggcaacatgacctcttgtgttgtaacctatacaaaggtaaaagtctatatggtgttatttaatgacaaaagaaaaataaaatcctcaaaatacacctccttcccctcatatgcactcactggcccattgaagaaccaggttgttatcttgttatctgactggattaagttactatgtcatgactgactacaaatactatagctttatattataatgtcagagaagtttaaagctgaagaggccttagaaattctcatgtctaaccttctttttttttttttttttttttttttttttgagacagagtattgccctgtcacccaggctgaagtgcagtggcatgatcgtgatctcagcactgcaacctctgtctcccaggttcaagcaattctcctgcctcagcctcctgagtagctgggattataggcacctgccatcatgcccagctaatttttgtatttttagtagacatgaggtttcaccatgttggccaggcttgtcttgaactgctgacctcaggtgatctgcctgtctcggcctcccaaagtgctaggattataggcgtgagccactgtacctggccctaacttttatttatttattaattaaattatttatagagacaaggcctcctgcctcagcctcctagagtgctgggatgataggtatgagccagcaagtctggcctcgtgtctaacctttttaatttaacagttgagagaactgaggttcagagaggttaagtgacttatccagatcacagtttgtaggacgacctaggcttgactccatgtcttcatttcccaagttttgggccctttctaagctctgaactaggctactttatttagattcagggggcagttaccaggtgactgggctaggcagtgtgggtattctggagttgagtgagacatggtccacctaagaggctgtctattcagctagctctgcagggggatagggtcagaatataagtagctagaataccaggccagtgagttggtgtcataaaattggccaccgttcctgtggactgaatacttaatgagggagtggtcctacctcatggtatcagggaaggcaccttagaagagacaatgacatctgaagtgggtttggatgtacagattgggcttttataggtgctagagtaggtcttattgggcccattggtattaattgtgtccaggaagacagagacttgtctagaggttggaagtacctgatgattctcatagtcctgctttgtcaccatcttggctttcagctctggggctgtcaggaatgggcatggccattgccaggcctatgtgtgtgtgtgtgtgtgtgtgtgtgtgtgtgggtgggtgtgcatgtgtgtataccgaccaccatagcccgtgagccttccctgaaggatgctgctcctgcaagcaccaagtaccaaggaggctaagcagtgggtgcaggcaggacatgcagtgcctggcagcagagactgccaggcacacatggctattgctggctgggctcctcagagctctgggcctggcaagagagaggcagcaggggtgaggcagcccctacctggatgggatggctatttcccagcgcctcattccccaggaggtcacctcgtttctagaggtgctgcctcttgccttgcaaacagagtcagacctgccataaggccacaggggacttagaaaaaccgtccccaccccaccagggctgcctggcacataccctctgctctgccatgcttttctgaatctttaaaataagtttttcattaattttagcatacagtgaagggaagtaacctgtggcttataaataatggcaacagctttatggaaacacctaaaaatcaccaggggcacataacaagaaagttctccatctccaggtgcgaaaacacgctggtgattacttgttgagcaagaccctgtcagcttttttattacaatacattattgggtaatagttttaaaattatttatagaaagaaatcgagctgtgccgagaattccatcatttaatatgttgtctgtgaatctcattagcctttttagcctaggggttaggaaggaaaacagagcgttggctgtattttgaagattgagcactatatacactttttgtcgggggcttgttgaccttatgttaagttgcttctttgcgagtctttctgtgttacagctctggtttccatggtatttacataaacctagcaacagtttgctgtgtagaggcagtggcagggcccaccatctcctctgccaagaaggaggagcagcttaggatgcctgctgtgcaggccatcaatgggcaagtctctttcaggtaagttacagaataggtaagaattggggtgagatgggatgtcagctgctccccagtgtatgtgtggcctctcctctgtctccaggtgacagaggcagctccagtattctgtttttgaaacccatccggtgagttctcccatctagccccaggccaagcagcatgggtctcggcagaagctcatcctgggagtgggctgctctagagaacacgactccatgctgtccccaggcctgtgttctccactgaccccacagctgcatggccagtaggccttaggctaagttcaggaaggacccatctgaaatactcctcctaaatgaagagccgttctctggtataagagggatgttagtgtggtcagaacaaggctaaatccggaatcgggagagtgtgacaaatatcaacgaatggattattttcaaatgtgatctctctaatcagctgtgcagggtgataagaaagagcaaggggcttggacactggccccagaatggtgcaatgagttctttatacctcacaacatggcaggaacatttaaaaaacaaggtaaaaggaagtcactgggagcaaacagaagaagtgaagagctgacttagagcacagtgaccttgggcaaataaacttctataagtctcggtttctttctccataaattcagaataatggtacgtaccccgccttggtacttggtgcttgcaggagcagcatcctgcagggaaggctcacaggctgtggtggtcggtgcacacacatgcacacccacacatgcacatgtgcgcacacacacacacacacacacacaggcctggcactggccatgcccattcctgacacccccagagctgaaagccaagatggtgacaaagcaggactatgagaatcatcaggtacttccaagctctagacaacctctgatttctgtgagaacttgatgagatcatggaaattaagcattcagagcagtgtcacggctcactggggtcgagcaagtagaaaatctgggattcaaacccagacagtctagccgtagaacagtggcctttaccactaccctattgtattatgccattctttcattggtataaagaactatttgagactgggtaatttatttttttaaaaagagccttagttggctcacagttctacaggctgtacaggaagcatagcagcatctgcttctggggaggcctcagggagtttccaatcacggtggaaggcaaagagggagcgggcacatcacgtggggaaagcaggagcgagcgagagagaggagcaggaggtgccacaccctttcaaataaccagatctcgcaggaactcactaggacagcaccaaggggatggtgctaaatcattcataagaaatccacccccatgatccaatcacctcccaccagaccccacctttaatattagggattacgatccaacatgagatttagaagggacacatatccaaactatatcaactatgatgcctccaacaccttcagaagcagatgtcttgaactgagccataagcaatgtggagaatcaagccaggtggagaagaggggctttgactttggagcatagagagcatagagtaggtaagtatgaatgtgaggccttcatgggaacctgccccattcttgcctttattcacctgtttagtttaaagacgttgattgggcaccagttatatttcaacccaggcactgtgtgtgaagaaaaaaaaagatggagcagacagttcctcccacaaatagttgggagttaggagagttgtcctgcagagtaaaaagagaaaataacagctttatgagtagttaccatgtgtcaggcgtgattttgtgggctttacgtatcttaaatcattggatcctcacaagggccgtaggaagtaggtgccgttattaatgtctattttagacaggaggacctgaggttctaaagaggcttagtgaattgactgaagtcatagaactgaccggggacaaagccgggatgcgaagctgggcagcctggcctctgattcctggctctgaaatttctctctatggcctgtatgatgctaatcatgggcagctccaaagctgtcggggatgtttagtctaggggttgactaagaaacaggagaatagtgaaggctcaagattcatttactcagctggtctgcaaatttttattcttggcatcatttggaatgtgtttcagcagtgtagatgattttatcttacaggttttattcagctcagtgccatgcaggtgcaattggagcatacagatcctgtgcaccgccactcgttgagctgtgtgtggccaaacacaggtacaggaaagctcagcacctgggcctttagggttttgcctactcagtgttctaagatgtagagatatttctgtaggagggagtgatagtaggtttttggatccaaggaatctcagttagggaggtccttggagctcatctcatgaaaactcaatggcttaccccccgaaaaaggctttctgaaatctttaggcattctgtaaagttgtatctaaggttaagagaattgaaactgcagcttttatggagatgtctgcctggattagatatgtttcctctttctccctgggatgtgccacctggagaaggtccagggagcagccctgtggcttttgagaaatggttcagtttgctctggggccttctgatgcttctctgacacgtccgagtaggcagcatttttttttaaacccttgattttcagaaacgcattgtccctgagttattaataattatctctctctcctctctactctttctttctctcactctgaaaatcaacatcaacttgactaaatcccttgagttgagcttagtccagtttttcagttttcttctgcagctgaacactcaatgcttgattctcctgggggttgggtttagggccctccctatgttcccagtctctaggcctagtaagtacattgttttggaaagcctcttccctttcagtgctggctccctagagaccttcaaaacatcttgggtcagaaagtgcaatccaagcaagcctagatggtacaccacccccacccaaaagatccggatttgagattacccccaggacttttcctgttgatggcacatttgacttacagtatagtaatgtgtagtgctttttctctatgagcacttcataagcatccttcggtgatcatgacttagaaatgattggagaacctgcttgttcagaaggccagatgtttcacaagaaaatgaaggacagaggtctcccagtcagcaatattagtagtcttgggataatagcattggcaggagtctaaaagtttgtctgataccaactccttgctataacttatccaatccagccctctctatgcgctttacagataaggaagccaaagtatatagaggaaaattcccaaggatagtcacatagctgattgttatggcagagctgcgttatccttagcattgtaccacattcctccttcttctctggctctcagattttctagcacaaagagcaaaaacaaaaacaaccccaaagactagaaaatgaaacacagctcagcctgggttttataatgccagtcataggaggtgctcaataaatgcttatgacttgctgcacccccaggaagtactgcctcttctttatgtgcatagcttcgcgcagttgcaggcatgattccagcctctggagatgtctgatagggtgtgcggatgggccatgttgttccactagagtaatttcctagagagaggagagaagggagctctcattttgtatgtggtctgtctaatgcctctcacatccaataactttaaaaccaatcaaattaataatgtagggagaaacaaatggattcactctttagatatttaaacagggatatttctgccactgacatgtaaatctttaataggatatgagatttggcaataagaaaaaatgccaagttgctggagacctggttcttttgtactattttaggtccaatcattacctcctgacattaccttcctcaaataggtttatttgttgaggccctactttgtattgggtagtgtgtatttaatactgggatgtaaagtagtggaatatatggtacttaccctcacaggacttccactctgctgatgacagacatatatgtgtagaaagatgaatacaaatacagatcagtaagtgcagaatgtcagcctagttctgtatgtaatcactgctgcagatattcatgggaggaatggatgatgtgtagggctaattagccttcaaatagggaagctcatgctgtgaaatattttcacctggtcaaaggatgaggggctgaatcttgactcccataggagacaaaggatctggagagattttcagatagtcactgaagatttccagttgaagtagaaaaaagctttgtgtttgtgtctgtgtgcatgcatgtgtgcatgtgggcatatgtgcatgcaagcttatctacatggttgtatagacatttctgtcttttagattccaaagtgacttcctggagtgatagtgaggctcctcaaaacttggtttaaaaccaacctgaagcattctttattttcaagatctaaaatttctagaagctcttgttgtgaggaagttttcataaaaccatatttacatatccccttcctccttctgatccttcctggcatttaatattgataaacttcctattcccttgcccacctctattttctgtcatctggacttattaatgtgtcttaacagtaaactcttgcatcctccaattgttctcctcttccttccccccaacattggcctccttttactttttatctctttcgttttcttccactatagtgagttagaagaaccaaatgtaaacttgtagcaagtctttcttctgggttgatatctgtttcctgcccatcctggtggccagacttcccaacaatgggggaaagtcatggcgtctgtttcattccttccatgctccatcaagaagaccgctttttaggatcaatttcctccctttctggaaaattgctcactatttagaaagaagaagtgttcctactctgaagctttcaattgttgccaccttaatggtctctctcattattcccaggcatgacagcatgagttttggtttggtttgccttccttgacatatcagaatggttgagatgaccttgcttgatggaccatgggcataaaggaactggttggttgagtgtcaagaccaggaaaaagtatggatctgtccttgttgggagccctcttgtctacttgcttggttcttattagccagtttggaggttgccttctgccatcttcctttcatctgtgtggttcatcatgaatcctggcctagcttctcctccttaccttatgcttaccctttgatgcagagttccaacattaatgtctgcctttccaacttccacatattacactgccctctacttcccactgtgggcataactcactgactgcaggactgtttctccagaatgtggatgagacctcagaatccttctcagcaatgtcctgagggtagacaccagctgatcagttttatcatgaaaattgaaacctatcttctctccctggatcttaccaaagtactcattttcatcttcagcctagatgtcttgctagacttttttcttccctattctttccatctatttcctatactttgttcttcatctattattggtggtgatggtgatatccatatttatcacactcttacagtgtgccagaatataaaggctacaggtatcatctcatttagactttaaagtcactctaagggatactgatactattttacaaatgggggcccagagaggttaagtgactttcctaaggtcacataattcatcagtgtctgagctgaacctgaaacacactctgcccttttctccctgcctctgcactaccttttacttccttagtacctcattacatcttccatagtcactgaattttattctttgtcattgcggcttatttaaatactgactgtattggaaaaattaaaattatggtatccttaataaaataacattgaagagggtatagatgtctgcactgggaatattctttgtgtgtgaaacaaaaattcaacttgttatagtcaatgaagtcaatggttcagttaataatgcctctaatggcataattctgctcagtgccggtgatgggtaccctcaaaatcagagactagatttaatgacaggacatgtagaaatcagcgctgtcataaaaacagccgggagaggaactccataggagaggaaaacccctagaaatggcttgacgttattggttccagtctcataaatctcagtctccgatccttcccgtgattccccctttccatccagctgcacctaagtgttccccctttgcagtgaatgcttgcatttcccagtgagtttcctgtgcttagagatttgtttttagatcaatgccattttttatgtgttgctcatgcatggaagagctctactttctctgcttgttctaaataggagaaaataattttaaagactccttttaaggtgtcttaagactcctctgtgtgtgacacccttcagaggaatgaccttccattttagggattcccttttttgcacccctcccttacccccttgcattggagtaagtctcttgagactcactacggcctaggaccaggatgtaggccaagtggaaacacaccaaagtgatttaatagaaaaggtaattcctattcaaacgggatagtcccttattcatttcctcggattatcatcaaatttatgtcaccagcaaaggagctttattgagtttcacagagatattccttttgctctcattgtcgttagttggcacgctgacattttcatatgtgtctcagctaatgcctcaaaattactccatctacaaatgtaacaattgaacagataattttaataagattcagcttgacttcagactgcactccttcctttctttatagaatgcaaattgtaacctgtttttaaagccgtgcaatgcagtgaactttaatgggatttgacaacatcatattaagcacaacaactacgcataatgtaccgaaaaattggacgtgaaattggaaacatagctgagaacaaagtaaatttacatggtttggtagcttgaatgtctgatatcatattctctcatgcaagccccataaaaaagcaaaggatttaacaatggatatcagcagaaagtgcttttaaagttaaaactgatggatggcttgtcaaaaaaaataattgcattggttggaaagtcgggatgcgtgctgagggggagagaacaggatatacagagaggatgatgggaagtgacagtggtctgtcaggaaggactggctgcccagaggagtgtgaagccagagctataaggtggcagagtagaacaggctgtcagagcgggaaagtggctttaataccctgaaaagcaaaggaatccgcctgtcagctttgctcagccgtgctgaaagaggaagagaacatggcataaagttagagacattaaacaagggggtgggggcgcagagagcagcgcggagagcacaggcagggagtgggaaggaggtgggggaggcttcgtatgtgggtttctggatatgttctttcctattatattttcccccttttctcaagggccaacaaattaaatttgaggggctggggtttctctgcttttgaagaaacgggtgatttaagagagtcacatgctcgtcccagtggctgccactctagttgaatgggtggctttcttacaagtgcacctcgggttgccttggccgatttctggcttttcagatctacagcctcctctgctgacctttctcctcatcggagtatgcagtccattctcccagagatgacaccaataccaagtcgtcctgggactggcttattgtctgacaaagtgctgtgaggatgtgacactttagctatgtaagaggattgtgagtaaaacacaataatctgatttttttttgtaaattttttttgccctctcagcattaggttttgaataatttattattccttcttcatatactcctggcggtgaggttaatttggtcatcttgcaggggcctggctggtaatgaacatttttatatcaggcctcggagtactttctccgtaagacataccacatgtttaccacttaattgcccaagttgcttgagagtgttagcgtctgggggggttggaatatggcagtttattgtacagaaatattttgtgtatttgatcttaaaaaatatattctgagagacatccaaattcttgaactgcatatggccccaatataattttacatttggtttagtagtttggagggggggagcttctttccaaagagataattatgtcattgtggaggaagaaggtgatggtggcagtggtggtggtaatggtggcagcagcagacacttacataagcattttctttttcttttttttttttggagacagagtctcgctggagtgcagtgacacagtctcggttcactgcagcctctgcctcctgggttcaggtgattctcctgtctcagtctcccaagtagctgggattacgggtgcctgccagcatgcttggctagtttttgtattttttgtagagacaggttttcaccatgttggccaggctggtctcgaactacgaactactgacctcgtataatctggctgcctcatttattacataccaggcagtattcatttagctcccataacaactctagggataggttctattaatattgcctctgtgcagagaaggaaactgagccccagagaggttaagtaacttgcagtcattgaattagaattcaaattcaggtagtctggtagcagagtccattcttttaatccatgtgctaggtacacataggcatgtggggaaccctgaaatgccaggtggagtcctgttgtgcctctattattcttgtgtgtctaaggctttctgggaaggattttattagaactgggcatcaactgcctggaaagcaggttgagccacctagcagggagcaagaccacagagctatcttctctgtgttagccgagtaaaaagtggagcaggggagagaaaagatgaaacagtggcaggaggatctttcctggtcacaaaagttaaccaacttccaagttagattcaaaacacttgtctgaaatttttcatctagtgctctgcagagacatgtatgtttacactctgcattcagttctaggttatagtaagccggtttccagaagatggagacctgcactcctggttttcctagaacctagctggagaagccgggtggcagcccgcccacctttttatcttgattttatgcagtatactatgaaattgctcactaaagagattaattagtggggtcttcacctgggtgtttatgggcatgtttggcagtttgggattgctcccgtgttcttcaagcctgcagggcacgtcttgtggattgcagtggtgtgctaccacactctagcacccactcatgctgctgttattttggtttcctgggcctgtaactttgctgtaaacaagcaaaattgctttctactcagtgggctgtttcctgacacagcaggagaccttgttgtttttctcctggaaatctctgggcttctcctatcctatctgatacttagaaggaacccttgcagacttacatattacagtaaggcgcacacttgtcacggatctgggttgacttcagtgtgtctttaggaagcctcccctagtgctccacgctgccctctggctgcagcaaacctaaaagctggagagcaatactgccagtctcaagttgcaccatcagggacaccactgagatttcaactcttgaatcaaagaatttaggattggaatggatagagcttaactagccttttcagtgcctcagctcaggggtctccagcgatagggaattcattatacccagaagcagcacaagccaacttatctgagacaagtagggtttgttcttaagatgagccaaatgtgtttctctagaatttccatccattggtccttttcctaactccctggggctacaaagatcccaggtgttaaatttgtgcatcccataaaccactgtaaaactgtataagtcttcagcctgtagagatctgcctgttttctccttcacttgttcgttccatcatgttcaatggagatattaatagctagagagagcttctatcaagactcttccctcttcctcttctcctcacttcttccttccagcccactcttcccaaccttgctctgcactttttatggctcacctactctttcaacagaatccaattccttgctttaatttcaggtagccctgagtccagaatttaggtgttcgaggaaggacctcctgaattgaggtaagggaataagacacattccccaaaatgagactgtaatcaagtggtgctatttccactttgcaaatgaggtaactgaagtttagaaaggttaagttacttgcccaaggacacacagctagtaaacagtaaagtagatttggactcaggtctgccgacaataaagcctcagctatttacaaagcaggtctaatgtactggttataattatggattctggagcccagcaggcctgggttcaagtctccatatactaattggtgaccttgggaaagttatttagcctctctgtatctcagtgtcctcattggtggaacagtaataataatgctacctgcctcacagggttgttgtgaaaattaaatgagaaaaagcatgtaaagcagttggcacagcacctgtatgtgataaccactcagtaagttttagtttaacatcatcatcatcatcatcatcatcatcatcatcatcatctatttttaaaattatgatagagaatgtcagagctttgcacggttggctatggagcctgaaatgtggccacctaactcttggggtggggggtgaattcacgcggcagggagctgcaaataaccctttggtggatgctttacaatggaggctgggtggggtctgggaagagtggcagtggctatgattattattttttagttttgggtttttttttttacactttgagaagattgctacagttatctggaaatctattgctcgggcaaaagcaggattgcgtgatacaatttaaaaggccggcagctgcatttcatccttttcacaagaaaataaccccttactccagtgaagctaaaaataaaaatggcagtacatttggcaaccacgcttcttcctttattacctcagcagtatctgaataaaatgtcttattaagcaagatataagggcaatgaaagggagagtaagtcaaattagttgacatctaaagcatggtgcatcatataccgcgagggtagttactgtttagtaaaatggatttaatgcttaatataaatgctgatatttagatggctatattttggcaactcaggaggaagagaggtggtttttgagctggtataactaggttttaggtcctttcctgacacaaaccactcatgtggcactgggtggcatgctccataaccttgggccccacttcctccatgtgctaaaggaagggtgttttctggcacccagtggctctgtggcaggatctcagggtaatctgggaagagtggcaaaaacagggctctgaatacccaccccactcagacaggtgcaacactgcctgtatctgctttacatattgggacaactgggtgagattttctttggggaaaggattacacgaataaaacataggttgtcaaaccaccagatttgattatttctaaggaaccctacaattctcacctttgaaagttccaccatgccaagtttgaactggctctgaaagcactctgggtcctgtttcagctctaccacctacagtgcccagaaaggacctcggggtccaggagacagggcagtgcactagatacagcacaaggtagggtgtgaccagggaagaaaagtggtggcaaatcccattataaacatggatggatgcaggcttgtgtgcctgtatacatgtgtaagtgcatatacaagcatttaaatgcatgatctatgtgtgtgtgtgtgtgtgtaaatgaatgcgtttgtgcatatgttggtagaattcatgtacaaatcggtttcttacatttgtgcatagagaagatgtatgcacagccataccatcgttggccaactgttgtctcatttatgccagccatcaccttggtgggttaaccttcattttcgtggttgaagtgaggaaactgagtcttacagaagctaagtaacctccccaagttacatggctaacagtttgcagagtagagggatcatactgtattaggtatttgttttatatatgcctgggatagtgccttactattagggccctggtccacatagccctcaaatttctgtgtgatgaggagagtctcatatatgacagggaccactgtgggttagtcttttagaattttggttttgtttgatttcttgtttcattacttttgggatcctgtagttgagggttacaatgacatagcatgaccagggcttatcccaaccactcttttcccaaaaatgactaaataatgtcgtcaggagtttgttcaggatttccttctttgagagcttccttccaaaacttcttttgtgacagagttgggagcctattgaaaaatgaggctgatcagtcacaagtcctattatgcaaagtcattcttaggtactattggcaagtaactgaatgcaatcctagcaaagaccttaggaaatcttgtttccttttattcataccatgaagcacattgaagactgtcagtcatcctgcttccttggaatcatatgctgagaggcttttattctgaagaaaatcatgaaacctgcgaatagatttatgctctgcttctaatggttcatgaagcctaagtatatctaataatagttctttcacctgatttgcctaagactaagatcttgtataaacaactctcaccagaaccatcaatcactgtttaggaatttaaattttaccaactaaaatgagaatggaggaagggcaagctgttttctgtgttgagcttaggccttttatagatacaacactttggggaatttctcggtgtcttagttggagatgaggagaaactggagcctttgcacactgcaggtgagagcatagattggtgcagccatttggagaaatctggacttactagctaaataaaatatatgtaatgtatgacagaggtcaactcctagatctataactcagcaaagttttatggtaagcagacattcgatgatggtgatgatcatgtctttgttgctggtttcagtgattgtgactgttagactgaaggctatttgagttgtagtttattgacaagtggtcaagacccttttcagggtatattctcaataagccatttgtcaaagttgctgagagagccttcatctatctccactcctatgcttcatacctgctatatattctttgagtgcaatgttcatttagttgatgttgctggaatgtttttgtgagtgttaattgtgattcttagaaaagaagtaatcttggacattaaaaacatagaatccccaagttgagatttgagattatttaattcaactaataagcctaataagaattccagctatagttattcttataggtgatctgcttagattctcccagtactgggacatttgccacatccagagttattagaacattctaccagggacagatagactacaaagtattggtactattaggcaaagttgcaggattttgccaactgaaaccccaaggcattttctaaggaacagacaagagacaattatgccatcctatctagttcccgctactgcatcaatttgcttgggagctaaaactgctttttactctaaaaacaagttgaaaaacctgagtatctctccagggtggaatcagctgcatatacccagggagataaaacggtctgaagatgtcatgggcattgtgaatagggacagcagaggttacatccagtgtcagaagtcagtcaactcataggcattcttgctgaagaaaagaggcaggaaggtcactgccaaatgtgaccttgcctgaacatataaataactgttcatgtgtctaaattgtcatcattaattaagtagtgtttcatattaaaggctctcagtccagaatctccgttactttatagatgtctgtagcctcatgaagacccagatttctaggatatcagcgggggaatcatctcaaatgatgatagtaatagacatcttggtccctcaatagaagatgggattgccaaaatacttctggaagtcattactgatgttataagtcaaggatctgaatggaaggaaaatgcaaaaccagaatctgtattatttccttcctctaagcttctgctcaaggaagtccacccaagaatgctggtgcatcagtgagactctttagcagagagaagagattccaggcctactgatgcttggaacagccactctcatcagcaatactgagctacctgcttctcttgctggggaagtcctgtccatggagccggctttaccagctgtgcagtcatactcagggtgtgcaatgttactgatttaggagcccatgttcacacattaggatcaacccaaaccatcatatcctattgtatgtcttcttcccctcaccatgtcaaagctatgttaggtcacgaaatccctgacagctcagtcacacacagagtgcccagctcaacaacagaaccagaggttcatgaagtcagttttgctgttattgtgagaaaagacaaattgcaaattatctcaataaaaagctgttatcatttatatcaataacaagttttttgggttctcatttcaagcttgattatattagtacatttatagtgtcttttgttttttccctgtggctgtactttcttaagaagctggaagactaataaacactgatgctcttttgccacagatttcatctatgattttgatttaaagctttctgatcagtatagctgactgatcaagccacatggctgcaaattacttatcttgggttctccttccaattgggtataatagaggggatggctgtagagaaactcattaaagaactcaactatttgggaagctgaggcaggaggacagcctgaggccaggagttcaagaccagcctggcaacatggggagacttctggtctacaaaaataaaaataaattatctgggtgtggtagtatgcacctgtggtctctgttacttgggaggctgaggtgggagatcacttgagtccaagaattcaaggctgcagtgagctatgattgtgtttctgcactctagcctgggcaatagagtgagactctatctcaaacaaaacaaaccaaaacaacagaaaaaaaaaccaatgaaaaagaaactcgactaatctaagcaaccagcctgagtaaattatctgcccccttccatgaaaccttgaaaacataaaatcatgttgtttattccaaaggctagtagttatcactttatcttggctattctaaagtgcagtacttttgtgaattttgctcattaagtaacttactgaagttttatttaggagtctagaatggatgataatgttgaagattgttagggataatgtcaagctacttgacataatcaaccaaaaatgctgtatatgaaaggtgttttgtaaaccattaaattacttaaccaaagccttagtcaagaatcagtattaattcttcagaatcattcaggcgtagattccttttgaaagtgacttaagatgctcacagatactctagttctagccctttctgaaatagtcacaggtgctttcaacacatggctggccagatgctatcatttctgacagtgggtctgaatttaaggaagttgtggacaggaaccttatctgagctgtcaccatcctgactcatcaccttcaagcaaataatcaggctaaaaggataggctactgggacatcctaggaggatgctagaggagattggccaacgagattcactggactcttagtctctcaacctgtcactccacgctcatccatggaaattggctctgattcattactaatggagaaatagttcaagacttgctttgcatccctacacctatgtttggatgaggacttcaagagtgagaatacatttcagatacagttatggctaaattgtagtctttgcatgaaaaagaaatgacctggtccttgttaagagcagtggattcagcccaaggtggtttcctgatatagcagttgaagttgcagaagattcagagtgcaatgtatgtccctgcaagatactgtagggccagtaatgtttgtagcagtaattcctgtctggtcatgcatctgctagaatgtcgtatctagtactctgcacccactaccacctcgtagaaatagcttcacaagttatatggaggattggtgagacaggtgggagggtattcgctccaaggaggagaatgctgtgagatagccattttttctgcctttatattcttgttggggatatgttttttaggtgcctgtagctgtctcctgctgaatgggctttgttcagagatgcatttgcctgtataagggttgtggttttagaagactgcttatctccctcctagttgctcactcttacataggacagccatgtccagctgtaaaggtaatatactgcacagctgtaaacagcatccctaagaacaagtacatcaggaaatgtcttggggttcctagtagcagttagtgatgagaggaccaagcagctccagccttcttggttagctctgtggccttaggtaagctattcaacaatagtagtccttcatttctgagtctgcaaaatgtgcatgggtcctgggtaaggagaaggcatcacctgctgacctaaggaaagtgaaatatgagtgaatgcctttatgctttctttatggcataaacatgttaattacactcattacacacctcagagtgtccagtgccagcctttcccctgagccatttcctttgctatggacctttcggttttctgggacactttggtaaaaggatggagacagcaattaaatatgccttagaattattgtcattccatgttttatttttgccttgggtgtctttatgggagagaggaaaggccaggagaggtatgggccagtagacccctggctacccttggaggtgtcctttctctgaaccttgagttgaaagcatttatagggaaggaaaaagcttagatttcttctgtttaaatacttttcttccaatagaagacagagtgtgtgccagtgccagagacctgggtaacagtgagaaccttgaagaggcagtgagggcataaagggtgtgctcctggctagtggggaagagagacaagtttggtgcaggggtctaggtaccactcggccagcaggatgggcactctcggtcagtgcctgcaaatggtgttgatgtcagtttcctgttcatctgggaatgtcctggcaacacatgctggtttgtttcaggctaagccactacctggaggcagtgtgaatgcgaagaaattgggttgctccctttttcttttagaacagttttcctcttaaatagttctgtacaacagttggagccaatctatttataactgagttttattgaacctgatggggcttcactctcattgagtccatcagcggagatttccctcttgggcttttttcatggcaggagggtttcctggcttaatgggtgctctgtcactagtgctcctggtccctggtccagcttctctcttggtttgctctcagtttctcatcccaaagggaactcactacagccactcccaaagaaacaagaatcctttttctttcccgtctccatccttcccttactcctgccactgcattctgctactctctccccacaaattccctcaaagccttgaggatcccaagaaagagaagggcaagggtgaaaaatttaaaactgcccaagatggatagtgaaaacaccatgcataaataaatttcagcaaatcccccggatgaacaatgattgtgtggttgaagacctggctgaataagtgtgtcaggtactgattggaagcatgataaatgcaatgacctaacaaaggattgacttctcctgcagacaggccccttttaatggatggaaagggaggaagcttcatttagaagggaaaggctgtttgctgtgcagatatgacaaaggggaagtagacaaccattgatttacgtttgggaatgacagttgaaaaattcagcaataatcatgacaaatgagaagagatgcagtcagaggaaaaaatgtcaatacgttaagcctgcaaagaaatgccaaggtcacagagaaaggttcccaaacttctggttttgacaaccttaatggaaataataggaaagatgagggttcaggttaaaagggatggcagggcatgaagggctgcaggtgtgggtaattagtggtgagtttggagagggagtggcaggaagtccttctcccaccactgggaagccgtctgtccacatgcaactgaggtgcttcctgctgctggcaggcctgccctcctcccagaggtttggaaaatcaggcaagttattttaatgtcagtagtgacagcagaaagagagaatgtgggctgggtgtgcttgtgatgcttgacggggcacatcaaatcagaggtttagctctgatctcaggactgcagtgtgtctgccccctcatttttatttttattttattttattttattttgtttaaaagactgattataagtgagaggcagtgagctctaggttatctgcctggttgagtttggtaagatgtctccttgttttatatttatcattgttgtaaagcacccggtacattgagtcctacatttctgcactctaataagagaggcacaatccaggatgttctgtctgtgggcgtgagaagtgggtttaaaaatgtgcatatgtggatagggagggaggtgacctgggaaggtgtggaggaatcctcagacctgggtcattgtttactactaactctgtatgtaaatgtggacaatttgctttacttctccagagtctgacgagctcatctttaaaatggagaaattctggagggaaaaggtttctgacattctcttcctggtatataattccaggattcaatattatatctagacatggtgtgtggttttaggcctatttgcatatctatttgtatatacaaatacatatctcacatatttacccgcacatatctttttgcttcactgtgttggtctgtttgggctgctgtaacaaattaccacagattgggttggttataaacagcagatacttatttctcagcgttctggagactgggagatccaagctcaaggcagcagtaggttaggtgtctggtgaggtcttactttatggttcatagacagcgacgtcatattgtgtcttcacataggggcaaacaaaatctctctgaggtctcttttataagggcactaatcccattcaggggggctccactcttatgacctcaccacctcccaaagatcctacaccctaacaccatcaccttgtgggttaggctttcaatatatggcttttgggacacaaacattcagatcatagcattcagccatgcatgtatttcagtattttagtctgcagttaacactgtcttctcatctttattttggtttattctcatctaaatattgtttatggacttaaccctcaatattataaaatcatccttctgtttactgggtaaaaatgatgactcatatagtttttacttttgggggaagaagccctaacacccctaaaatacgtatattgtgaaaccagttaccagttccaagaatgacaagatactctctgtgggaattcttcagcttcagacaacgtttgaactatgactacatttttgctaaatttgttgaacagagataaatatttttaaaatcttattttatttatgtgaaatcatgtgccaggaaaagctccaccctaaatgaaaaatgattttattttaagccaagcaactccttttagataagccttgaagagaagttatctcatttaaaagaatgagccattttggagctgctgttgtatcacaattcctcttgtcagccgagtagcttgggggcctggccctcacagggttatccccaagccttgtgtcaccactggcacgtggctgttttcatttgaattgtttgagcatgtgaaagttcaaagtaaagcaggtgctgtgtttgaaagcaacactgccccccgtaactcaagcatgtgcaccatcgagttgccaaaagctctccaatttccatcagttaagacaccctttaaaccatagaaatgaaggggggcaggactgggttataaatgagtgggatctggtatttgagataatcttgaatctataatggtttcttacgacttcacttccacctggggctgcggagcgggcgtgtaaggaaagaagcctcttagattaaacattttctaatcagctttatcactcatatctgaatttatcttatttgaggaaaatgccaatatattagcaggcatgtatgatacacaaggtgaccctaccaacttaatgacataatacattatccttaatgaagtcaatatcttgtcttttagctgtctgtctattggggcgattaattgcagtgtcattaaagttagctctcttttcatttgagcttgacaagtcgcataaaactaatgttcttagttatcagctactggaataggatggaggatggaggaaattgtaggacaaataaggggtactgctacagctaacttgaaggactttttccagtgactgtttctttaggtctctcctttcccaggctctcttgttaggtgaaatttaaggcaaaggtagatggctctgatttagccaagggttcaagaaggagagaagaagatgctactgagaattacacccaatttgggagattttgagccatttagtaacaggagcttgattactgtcagggtttctccactaaataaatttgccacgttacctcctagaccaagctgctagcctagcctgagagaggagccgataaagaacacttgcaaccatgttttcatttagctttgaagtttttctaatttaacaggctttttggaagaagggaggactgaggatgggagaagggatttgtgcccgaaccatgctttgcaaatggttccaataaacaccagctcatcatgggcaatgtgggagctatagcgcctggtccggcactaattgtgaagccaaagcatcactccctgccttccccctacctctggaactacgagacaggatggctgtaatttacagtgtgttatctttgtctatagcggcaagatgatatgaagtaaatcaaggtacgagtaatgaaagactgagaatttattccttggagcacactttaaagtgtagtatctgttatagtggcactgcctgaagaccctgaaatgagacttggatgaagggcaataaagcagcatagaggctcatgttaatattgtttgtctgaggttagtaattgggttctactgatgagttgtgtgaagacaaagtgagaatcccagctagtattgtaaatcttacattgttggaacaagaagcaatcctaacaaatattgatcctctccgtgcccagaggcgaggagggaagcagcgaactgcagagcactggcctgtttcaatagcaccaattaccttagtgaaaccagcgctcggcatgaaatcccagggtggccgcaaacgatgaattagccatgattaggctttttagatggatccccccaaaatcatgccagcttaacattctgtctcaattatccttgtggtcctaaaaacatattttgtgtgaagtgataccttccagtggtgaggggccctggacctgtgtgggaaccagatgcaaatatatggccagctgctgccttcaacacagaggggctggagtatgtgcacttgagagtgaccactggacagatgcagctttccactctgaattcactgaacaccccatatttggggacacataccccacaagcatttgactttgttgttgtttttggttgtgttgtgttctgttttccctatttgtcgtgaattatgtcctaaagatccttggagagatgttctccaggggagaaaaggcatatctgctctgtgattttggggggctggcttcctgttcatttttaatgtgaagatctgctaaaggtctgtgctcatcttgtttggatacacagtctccttcctgggaatcttccctgagttctcactgggttgcattttggacccatgggaaagagagagtgttgataaaacctagagaggtcacattccactttgttacttcctaggagttcgcagcttttctctcctccattacctttggctgtgagtgtgcagtcagtactctcagaggtcattcctcaggccagatccggactttgggctggggtgaactaggtaggtatttggctctcaggcttcctagtccccatcctctgtacagcatcaaccttgtgcacactgcccagccaaatggctttggctgggagaagagccttccctgggggacttcaaagcatgtatttggtctttgatatgacactgtgacatgtttgtaccaacacacgtgcctttagcagaagaaagataacatcagaccccccaaatctggcagagggtgagcaagagtttggatgaagagaactatgcaccttctgggactaaaatgggagagggcacattttcaggattccacgacccagtcattaattaggtgatgaattcaacagatatttattgagtacctaacttaattctggatacacagttgagtaagatggagtttacattctagtagtgggaggtagcgatggtgatggaatataaacaaaataggggcaatttctgatgtaaactgaaaaatacagaaggcattattggggcagtaagcggctgggggtgggaagggcgtgttgataaccaggtggactgaaaggcctttgttctcctcatactacacacctggcatctggagccacctgtcccctcatgcatctgtgcccagtcttctttctggtggttgctctcacactgttctgaggacagctgaagtgccctggaccccatgtgtctgttcattttccaaggctcaggtaaaaagccgtgccttccacgaagccattctggtttccaccaactaaaagtgagagtttgcaccctgagttcctgtgtaacctcctatctctgttccacattggcacttggcactttctgtcttgtgttagagtagctttgcgtcccatctcatcgccactccttgcctgtgagttccttaagtacaggaactatgtacctataatatcttatccctgatatactcagcagtgtcttgtgcttagtaggtgcttcataaatattcattaaataaaataattacagagaaaagctagggaaatttatggggtgtgtgtgtgtgtgcgcgcgcgtgtgtgtgtgttgagggggtgtttgaaatagtctggggtttgatctaatacatagaaatgcttccatgaaatagaaatgccttacagttgtgtgtagctatttcactgagtgggtttgttatatctgaatggactagtgatgtctgcctgcctctctgggtaacaaacacattttggagggattgttaacttgaaggttgtaataaaatctttaccactctgaacagctagcattggtgtctgctaagggggaacaaaggcaaaacgtagttctgttggtgaaaatagtttgactgtgtttaaaaactaatcattctgcaaatatcaacaagctcagcagatgcaagctagccaccttatagtttaaatggagcccttcacgctgtattggaaatgccgccgcctccagcccaccctatactccacaggccagctcctgctcttctggccaaggaaaggcgagtaagcaagtctattgcccgttggcctcctgagacacctctgaggattaaataactaatgactgtaaagtgctctgtgaaaagagagtgctctataaagtgttattgttggggctgttaaaaatggaaaacgacttttaatttagaaagagaacactcagcataaggaggggtggctataaagcttttatcaccactttgctttcggaggcttcttagctgttggtgttggcgccatggtttgcttgcccaggggttctgtcaccgttcatggggtttaggaaagatgccagcatctcactggcatggtgccatcctgatccccttcctgcattgtaacctcgtgggcagatctgcgacttgattggcttgggttgcctaacattgattagaatttcctaagagcgagccacctggaatgtagagtatcctgtgatctggtagcttcaggaagcccccaaagcagccatgcagaccacaaaccacttgtaaagattggggactgatgacaatcatgccatgtggacagtatccaggccctccttccatctcttgaggaataggactcagctcctctttctgttcaatgaggatattgagtttttatcctaaattcagaatttcaccaactccttctaggctccttgttcatgtcctactctctccatgtcacatttatgtggttgggaggtttaaaatatagtgttatacctctgcagtctgtattattattttacatattatacattttgtgtggatttgtaatcacagcgtgtagggtttgcttgggcaggttctcatttctaacatgtcatcctgccagtgggatggaggctctctggtcttcttcttctttggctcctctgactccaaacacttcaacacctacccttcctcagcgacgtgcagccccttcaagaagagagcccataaactcagtgtttatcatacaaatgtggtgatgtgtttgcatttttatgacccagctaagtggtgagtattcatttgtgccacctcaccccagatgcccatccagaggctgagctgtttatcatgctcatctctttcccaaagcctgaacaaggagcttgggaccactataaacatgttccctttcaataaagaggaaattattatcatatattttggtaataaccaataacatttcaaattacttacatttatggcttataatcaagcttatgcttaacctctaatcctcatgaagctggtgatgatgggctcggtagttaaccacttgcgggaagttaagggcaggtagaaatccacctgaccagtaattaaccagagaagcaacccatttctgcagttgagattataaacactgtgcttggtttatgtttaattggcaacaagtgaggtgaaccccattagttttgcagtgatgccctggaggatttggcctggtcaacttctcatcaattaatgtgctgatgagggatgctggttgctgcacactgggtctttgggttcctggtctttgtttctttagctgagcatttgaggagattgcttggaacatagttcatggctggcaattgaaggatcacagagacattgctctctctgtaactatgtgttctgattgcggttttcagtagtcttttgtttgaagtcctatcatccatgagtctggatttgtgtgggatatgaactactgtgatgctacaagtcatgtacttagattggcttttgagttgaccattcatttggagaggcttatataaagaaatgggccactttgtggtcaggccatttttgtctccgagtaggttaggaacagggatccaagggagtctggttccaggatggatgtttcttaactgttagatgaagttaaagggttctaaattggatggcttagcaaaagcacccactgatgttttcagcaaaaaaaaaaaaaaaaggactatgagatagaatcttccagagtccactcttgtttcactgctttgaggattatacctttaagcacattttaacttctaaatcatcccaccaggaatctcctatgacactcatggaggagctttataaacaacttagtcatcccaacaacctgtgatgaaagtactattctcccaccattttacagatgagaaaacagaagctcagagagcttcagtgatttgtcctaggcaaaacatctaaaaggtacacagccagaaataattagttttgtctaatatcaaaactcatgctcttaactgctgtactttattcttacttttatgtcattagaaagaaaaatgtcccaagcaagtggaattatcatggatttcctctctgttatagaaccaagaatgtgaattgatctcctgtgatatgttagctgctgtatttgggactcagtggcatattgggagatattgacatattaatccaaatcaaacagttcatttttggatgataaactattagagattatttgctcagtttattagcaccagtggattagagattggccatggttgcttagcttcatgaaatagtagggctgaaaggagctttgggtagttatctagctcaattcaacacttattcaacaattatttattgaggacctgctatatgctcatgctgcatgtggttgtatgctctgctctgctgtctcacatacacttataatcatgtactacaatgttaacattttgcttaaatcgctatatatctttgaaagaaattgaaagaagtgagctttacatgttaccccatatttgtcttttccactgatcttcattcctttttgtagaagagaaatttcatctggtaatatttctttccagcctgaataatttctttgaatattttttcttttatcagctttctggcaacaaattctgtttttgtccatccaaagttgtctttatgttgccttcattttcgaagaatattttcattggatataaaattctgacttgatttttgttgttttagcagtttacagaggccattccatcatctctggcctccattgtttcttatgggaagtcaattgtcactatttaatcattgttcccacatgaagtatcatttttctttgcttttaatattttctccttatctttgattttcagaattcagaggttaatattcataggtatgattttctttgattttgtgctatggatttctgtaagtttcttctatctgcgtgtttaagctttttgtttttaccaaatttgtgggggttttttgccattgatcttcatatatatttttttctgctccattctatttttttctcctactgagactctaattgcatgtatgttagaccatttaaaatactctcataggtcacagtgtctctgtttactgtttctaaaatcctttttttctgtatccttctggttagataatttctattaatctaccttcaaggtcactgaacttttcccatttctgttctcctgttaaggtcaaatcatgtgtgtgtctgtgtatatacacatatatatctatatgtatatatatataaaataaaatatatatgtatattttattataaatattgtgctttttagtttccacattttctttggttccttttaaaattctagttctctaatgagaattcccttctatccatctgttcattcattataatcatcttttcccttaagaccttgttcatgcttattacagctactttaaagcatttgagtcttaattacaaaatctgggttatctcaatgttaatatctactggcttttaaaaaaaactcttgactatgggtcacattgccctgtttcctattcttatgttgtctagtaatttattgttgtgtcctggacattgtagacaatacattgtatagacactgatagattgcaatttctggtattacctttccctcctccccactttttaaaaagcatgctgagattttgttctagcaggcagctaacttggctggactcaaattactaattgagtctctcatgtggaaagtagcccctgaaatctgtggtcagttctttcagacttccagttgttacttttcactctgtcttgtaatcttcccagcatatgtgcagtttagggtcatctcaggatttagttgtaggattttgcagactttgtagccttaccctttgttgttctcttctttctgggatcactcccttcactttccaactgttctgccagtggcaaaattcatccttaaccacccaagaagaagcagaaaggtgacttcctgcttgcattttagccactccatcttgcagacttctgttaagggccagcttccatctagcttctgtctgcttttggtttctttccggtacccacatgtagtagtttttagaatattttgtccaaattttataattttcatcaatgggagggtttgtttaatataagctactctatcattactggaagttgaactttagatcttctcattgtttaagagaagacggaaatatatagatttttctgtgaaatctcttgattatttactctgggcagctacattgatatttaaaacaccttgtgtagggaaaaaaatcatgcctatgggctaaatatggcccctagaccctcagtttgcaaaatttgatctagttcagcttgccattttagagatggggaaataagttcagagaggggatgtgacttctctgaggccatctggtatatcattgcagattttcaactagaactaaggtttctgactttcagctatatatctcttttgttaggccaagttattgtccctttctctgtctgctagaataggcaactgctcagatgcactggctaggattcccatgggagacatcagagaataacccctgcaaagagtgggaaagcagtaagaccagctggagaaggagcaccatcgtgggccattactggactgcttttttctcttccacttggcccacttgatatttggggcactgtgaggacaggcagacagctgcctggtggactgactcagtcctcctgaatctagctctcttccagtcattcttatgtttaaggttaccaattctccgctgtgcccatgtgagctatttgatgttctcatccaaagcactgtcacgctagataacttttttcctgaactctgtcctgtcaccaaatgtcactgtgcccctgtgcagggagacatggagcatctgactgcacatgggccttgggatgcttctctcataaatggcagatttaggaccagacaaggaattggtgcaccagccataaatcctgagaagaataatgccagattcatctggctgctggcgtttgatttgtgggtgtgtgaaaggtcgcacaacctcttagaggagtatggtggggaaaatatggttcggattgcccatcctagctccttcttgggctttggatgctctacaagtaggcaaatggaaacagtaaatatttgggattccagatctggtcctttcccattttataacattagtaactttgtccttaaaccttagtttccctttctgggctcctttcatcttctatggtagttacatcccgcctgctacagactcctctcgtgttctcggccactcaccttaggcaggggtccactcttaggagaagatcttatgtcagccacaaacccccagtgcaacaacactgcagaactctaagaaacctttcaagacttctggttgaacaccttcacgtcacataggaggaactggggctgaaaggaacaggaagccactggaagcctgtagctggttaggggcagagacacatctggaactcagttttctaggccctgccccacccatccagtgcttttcttcacctcactggaaccattttgctttggcgtgaaattgtctaaaccattttatctggggtaaaaatcctctcggcctaagggtggacaatttgccccaccttctcttgcccttaatcctagtgtggtactagttttaactgtatgaaattgccaatatctgaccagtcttgacctacaaaaatgtcagttttgtgcggttcaacctaattctggcctttttctttgggtgagtgttgatttgggggatgagttggctcaggtgaccggaacatggtgctgatgagctgagatcacaggtcagaggactgtgtagctttccaagcttgtctgtttccccatgctagttcgcaagcctcacttcaggcagccatcctgacagcagtgctcccattgctgggctccggatattcatgtaggcaggtgcccagagtgcgaggaggcccatgtccattccatgccactgcagtagaagggaaggggagggacccttgggtactgatgagcctgactttgagtcctgggtctaccccttttagctgggtgaccttgggcaagttcttaagttctctggtttttagttttctccttttaaaatgagaataaaaagattttcttcatgatttgtgaaagttaagtggcacgatatgcaaaagtacttggtcagtgcttggcacatagtaggggctctataaacagttatttccgaaaacacacacatacttcacggtaccagagtgctgagcctttgactttgggcagcactttgcaccaattcatagatctctcccctttctgcctgtctcttctgaatcttagagctcgttgtttcaatgttcttgctcgattattggattctgtagataaagttcgtcctcacagggagactgtatttttgttgagggcagtgatattatttgggacccccactattacttcttcagccttaggtccatagaagggccttgaatgaaataaattgttgaataaaacaagcttctttgcagacactcacatgcccactgtataatccagtagagacctccccagcagtgtttgcataatgttatacgttccagccccacatttaatggttggtgattgtgagggttaaaggtggcttttctcaaattgtagactggctcttagagtctgacaccagcactctatgtcctttgaggggagaattctccttccacccatagattatcagagaatcccagccaagttccaattgccctgtgataatgcagtactttgttcccgagcaggttaggaactgatatccccattatgtggcatatcatgaaatgaatgttattgttaagtgtaaggacagggcatattagtggtatcttttattacgcagtcttcattataaaagaacagctattgctaaagtagtccccatttgataggtagtgggacattgttcttgtgttgttggtgctgattaaggctgggataatgcactgttcctgcctgttacgtccatcaggaaacaaggccgaccaaggtaaaatagatgagcgtatgttggcgacagattaaaaagactagtgtaaagtccattaataattctcatatttaggatttggtttctactgtacttactgaatctgcaacatttaatctcttctatgtgagaccagctgagagaaccttttctcccccttctgagtgataggcctggattttccgagacagtgcatttgtctgtcaggacccatggctgctgtggtgatttacttgccatcagatgatgttggtgtccggttggtgatatagccttgctggatatggggaaatttgttacctttagctttgacaggaagataattgctgatggttaacagaactgagccaaatccattggtttttcagtaacacaagcataagactggctttgagaaccctgcttttccctgcatacacttcaattctaagcttttgtgtgtgtgtgtaaaatgtgtgtgtgtgcatgtgtgtgtttgtatcttgagggaaatgcaccagactccagattattctccttcttttaaaaaaaattgctgcagcgtactagcatgaggcctgaagaagtgtttgttcactctacaaagaaaagaccttaggtgagttggaagtgggtgtttaggaggggtgtcctggaataccagaagcagctggccacttgcaaaaaaggtttgtcgttagtagggcattgttttgttaggcatctctcctgagaatacataaatctgggcctccatcatgtagcttgtcaatttgtcttcacactgtgcaatcaagtgattggttcaacaatgccttgtaatgtttgagccttgagggcttctcagtaaaagtcttaaaatgttggaaagaaacttagaaagtctcaggggatagccatgtgcttcaaagagcagcgtgcaggttctggacctgggatgatgatgggctcacgtggttttcctaggcacaagggttgggggaaggccatggggtataattggaggagtcttaggaagaaatttagagaaggaatagaactatcctctagcccttcctctctcatcctttggccattacaatgaagggtccctgggaagccccaatattatgcttctctccttgggcaccctcgatttggagcttgtgatgatctacctcagtggcacaacaggctttgaaaacacccatatttacccatagggaagcttgctttttgaggaagccagagatgcaaccttctatctgcaggtactgtgtaccaagagcaccagttctcacctcccttttcttctgccccaaggaaaatttccattttgccccaagatgttgcgaagagggcatgaagtgtggatactaccaaggctgccatgtgctagtgtcatgacgttttcttggtgacaggaatactctttctgaagcccagagaactctaggtccttccagttttgcaggagagggtctctggaatcaccttggttccccaaagcagaaaatctagaagagtccttgccaagacggcaaaatgtgtgaggggaaccagatgttgccctccctgttcagccctgaatgtgggtggctgtggcctttggaggctggggtcaccccccttcctcattgctcacatctgtccagtgaccaggtactcataatcttttattaagagactcatcagctctgcccttctttccctctctgtagccactgcccagggccaatggcactcatcacttcctccctcaatgtttgcaatggcacctcagctagtttgtgccttcagcttccctgtccttgaatatatgctactcattgacttgaagcttacccttctaagaccctgagctgaccagagagctctgacagcagtttgctgtgtctctattgcttcctaccttatgtcatagacagctctgttcacacatgccccctctttccttccagactgcaccctgtttgagggccgactcagcattttgtgtttgttctgagatgttcattcctttcattcctgcttgtttagttctcttatcattcaaggcccaacatcagagccatcactcctgggagatgttttctctttctgctaattgaagtcctcttcggggacttgttatattattaatgacaatactttttgtgcacacctactagctggtaagtcccttgaagtccagggccctatggtgccctattcttcctccctatcacctggcattgccctctgcacacagtgatcactcaggaacctttaatgagtgaatgaatgaagctagagtgtgatgatctccttatggctcctggattgtttcttgctagtgcctggtaaatgacttagttttctatgttgatgtttcattgagaacctactgcgcacacatcagtggttagtcctggaaagcagggtaagatccatgtgccaccacttcctgattccatgcccaaggcagacatcactggtggccacagtgttcactctcagtgaggcccaatatcgcctgtgaacttggctccacgtgtcattcctggcagctgctacccatcattagttagtatttgaagtgtaactgtcctgccatccctggttcagctatgatgagaggtcctgagaaagctgacattgtcctttcccaagggaatttacagttcactaaggagattaagtaaatattttaaaagtacttagtatgtggaagatttaagtagtcacacaaggcactaagtggttcagagctaagcgagtggtggtgggcggtagcaggcagtaataatctggggagcttggaaagtgaggaatgctgagccactgcagtcagagccgacttcctggaggaggtggctttaacacctagaggaattgggagaacagtctgtggcaggaggagaaacagcccaagcagctcctcagaggaggcaggccaaagagggaagagctttagattcttttcttatggtcagggcaacctctagcaatggaaagcccagatgtctcaaagacctggacggcactgccatggcattctccttgatttgcgagctggtgcatagtcctgaagagtcccttttaaaattcttcactctgaggaatcacttaaaacaaatcatgattcttgaaatctgcctctaacccccaaatagttttttttccacggtgaagaactggaatatttctgtgtgtttgctttgctctccatgggtaacctctcttcctgcatgataaatacacatttgaaaatattgatttgctgctacccctttgaaaagcttaagaaggctgacctctgcctcagcgttctctgacttgaatttttcagactgaccaattgacccctggaaaggctgagaaacgttacctgcggtcctggagggactttctgggggacggaggccacggtggtggcggccacttggcaaatgcctgaaaggagggccttttaataaaatgcagtatgtccatggctcaaatctaatgacttttaaatagctcctgggaagaggaaagcctccatggtggagcccaggagtcaccccgggggaagtgccattttccagactcatctcagaaaccctggggtcccctcagccccaagtacatggggctgtgttgggcctcaaagtttgcttcttctcaacctcccaccccgaccccgccgattgctcctcgttttattttctttccttggttttaccacggtatgacctcgtgttgtattttttctgaatgacaatgaaagtaattgaaaatattgattggcagtacagttaagttgtcaacacaaccatttaatttgtcaggaggacttgttaaattgtcaaaaatcatataaaaaaactccttcagtcactgatgatatacattagagatgttcatgaatcaaatgggccattttggagataagtgttgaagaaaaattctgaaatgggtttcttcagatacgtttgtgttctctcccactctctctctctctgatcacacattacaaagaatattggaacgattttggcaaggcaaggtgagtgagggatacttttttgagtagaggcctcactaagggtatcatggcagaaataagatcatttatagcaattaaattagaagattctaatgcggatgccatcaagttatttattaggacaaacgggttgggaagttcctttcctccttatatgtaggatttaaaatatgtgtcttggaatatttttttcttacggaaattctttttttcttttttgagacagagtcttactctgtcacccaggctggagtgcagtggtgctctcggctcactgcaacctccgcctcccgggttcaagcaattctcatgcctcagtctcccaagtagctgggattacaggtgcacaccaccatgcccagctaccttttgtatttttagtagagatggggtttcaccatgttggccaggctggtcttgaactccagatctcaggttatccgcctgcctcagtctcccaaagttctgggattataggtgtgaaccactgcacccagcaggaaattgtctttttaaaaattatttaattttttaagagacagggtctcgttctgttgttcaggcttgagtgcaggggtgtgatcatggctcactgcagccttgacctcctgggctcaagccattctcccacctcagcctcctgagtagctgggaccacaggcacacaccaccatgcccagctaatcggtttttaaaattttttatagagatagcggtctcactatatagcccaggctggtcttgaactcctggcctcaagcgatccttctgcctcagcctcccaaattgctggaatttacaggtgtgagccaccatgcctagcaggaaattgtcttttaggggctcttggctgctgactctgccagccctgtgtgaggctgagtgggtaataccagcttcctgttcagatatgtggggccctgttgaaaccctcctgcattttcactgctgctagtaatttagttcctgaagggtctatgtgcccaaatgaaattggaagtagctttatttattttagattaatttaagaatagtgctatctgctaccccttggtcaaaatgagtcaagtcattcttgacattgttagtttttagctctatttaataaaataatgtattagggctcagaaatccaacttgattcagcttgagggaataaaggattttattggaaagctactcaggtcactcctatagttcacaggagggctggtgtggtaggcagaatactaagaatggcccccgcagtattccttgtcccctagtgcccagcctctgtaatgtgatgagatatcactgccctgattctgttgtgttacatggagtggtggatcttaaaaagggggattatccaggtgggccgaatctaatcacacaggatctgaaagcgcagaactttcttcacctggttgaagcagagaaagtcctagatattcaaagagagagagggatttgacatgctcttgctggcgtgacaatggaggggctcacgagaaggatcgggcagctcctagaagcagaaagtggatcacagccagcagccagcaaggagtcagagacatcagctgtacagctgcaaggaactgaattctgcctgccacctgaatgagctcagaaggcgatcttttcccccagcgtatctggttgagagcacagacatgtggggactaacaccttgattttggccttgtgataccctgagcatagaacccagctgaggggtggagcagttgtgtgcagtcctaggattggggttatgcacctgaccaaggtctatcccgatgataggcagccccccaccgtaagctcatatgcagccccaaaagaagggaatgcagttctgggaagataatataataaatgcttgctaaaagtcatactgcatctcatgttgctaaaatgcatgtttttcacattttatgactctgaaatgggggtgcatctttccaaagcatggtgacttctgaaagaaagctgctggccagggtctgccatgtttgtctctgcctatgcttgggcagccttggcagctgttcctggtggctcctctcaactgtaacccctagggtttcagtcagcaaaccactgaacggccatttgaggaaagattctaagtctagttattgtctgaaaaccttctgttgacatttcctggtaagattgagaaagtgctagtatcaaaacttgcagaacgcttgttggcggctgcagcagctatgctcttgagtgacagagaagatgatattttgtgtgagaaacacaaacatcgataaactctgagttgaaaattgattctgaaaagtcaggcagtgagtgggagaagttttgggaatgctttattccatgtatttcacctatgtatatttttatgaatgcacacaagtgataaaagtctgtgtctacattaatccaaaagagctattttaataagtataaaataaaaatgccaagtgattggaaagcattgtgtggcagtttaattgctttgtttttctcagtgttacataaaatcatgctgtattaaaatcaacggcacattagattcatataattttaaataaaacattttagtatattacacattggttatcttgtaagatagggatattttacttggaaaagtggagactggggttttggcattgtgatgggctgcaaaaattggtgtcttttaaaattcagaattgctgaggtgtctgttgattagactgtaagagaaaggactgaatgcttgatgcaggttgaaattgtgccaatcatgtgtcccagcctccatgctccacaaacatttactgccactctctgccacctgagatgcctctgggctctcacctggaatctgtgattaaacatgagttggttgggaggtgaggcattgagaccatgagtggttggggtaggtgtccttggaatttataacatggctttgctttgtttctggcccaaggtggtattctgctgtcacagaaagaacacaccagaccacattttcatggcatctttaccattacctagctgtgagactttgatctcaatatttacctgctttggcagtctctatttctgcattaatgtaacaaaagagctaaactatagtgcctcaaattttgtttctagcactaatattttgttttcaaaaaatgtgctcagtgtctcccttgttgcatttctttgacttctcatttctggtatacatttgttcgtatttttggagttcctgtggcttgctgagccctatgctgagttatgcatgggagaaaagctgaagatggtatccttatcctcagggagctcttccatggcatttcagagagaggatagatatctgaaaatgggagtatgtctttatttttaatatagcatgaaaaaagaaagtttattagttatctattgcaatgtaatacattactacaaaacctagtagcttaaaccaatttatatttattatctcctaatttctatgggcaagggatttagtagcaacttagataagtggttctagctcagggtctctaaagaaattgtagtcaagatatattgtcaggactgcagtcacctgaaggcttgactggagctagaggatatgcttccaaaatggctgacttgcacaaatgtttgcaggaactctcacttccttttgaaaatgggagtatttcaaagaccatgtgagtaagtagatagcagaatgaactgtgtggattattaggaaatacagtcttctggagagggttttgttttgtttagcagagaacaagctggaggatgagggttaaatggtctgtgaacttaaataaatcagcagcgcttattgtgtttgtctattggggtctctgaattgcctctcatttgtcctcattctgggcattcaaatggggctggtgtcagctacaaaacacataaggacctgtaggcaccgttttttgctctgggcttaaacacctctgaaactcaaaatgggaattggatgtctgagccccctttattctaccaccatcactgtacaagtgtggtccctgccatagctagttcagggtcctctaatgcccgtagtctttctctgtcctgaggtcatcatggggcccaggctgcttctacctggttgctctgtcgttctttaactggtcattcttgtctttgtggccaaagctggcttaccagcacagcatttgtgctgtatttcatgggaagaagggaggcagcatgaagcacagccagcttcctttttaaggatatgacatcaacttgcacacagcacttcactgatattccattagcttgatcttagtcacatggcttcacccagctgcaagggtagctgggagatgtagtctctaactgggctaccgtggacttttccccatgaagaagtgtgcaaggaggcagttacttgtctgccacaactgctaccactgaaatctttgctttgtttgccttcttttacactaagcaatgagttccttgcaactagcatttatacttttttaatggtcacagtgtttataatagaacttagttcatggtagatacttaagaagtgtttgctaaatgagggaaacaatccatgaatgagcgaagaaatgcactgatgatggcacacactatttggggcccttctttcttgtatcctaagaaatagtctttgtatttgagtacatttagctgaaccgttagtgggctatgctgagttcaacctgtaagaggatgcttggcttcatctgccatgtggtctttgaacccaggactggggagatgaaggaatatttcattaatccttgcaccatttagtctccttatcaaatggcccaggcctattctttgttacagacaacaatgaagggtgcctttaagaaatctccagtgagtaccgaggcattgcagattaggtcagtagaactgctgctaggttgagcatgatggatgagcaggagaatgagtttctgctgcacggtattgtgaaatcttttcattgtcaccaacgggcctatgaggaactgatgaatgagggagcaagtgtcagaaacgcccttccttgccccagtacagttttaatatctccctgagctacaggatgagtattgataaaagtaaagtttaaaaatagccacggagtgatgggtagccatgatttaaggagaacagcaatggggttagagagggttcattttcttgaaagtgcatgagcgggagagagtgagaggaggagagaagcaggagagctggactgtgaggggaaagagcaggaggcttttataagaagctaatgtgatgaggatgacgagggctttgatggatgagttagctccatctggtcgcagtatatgtaataaatagctgtgctcgggtttgacctctcccttaccagacacatctttctctttggggatatccaggagggagcttccattagagtaaagaacccgtcatgagccagagctgaggatgtttatgggcttgtgcagagggcaaaaaggagatggtatccaagttacaggtttataaactgaaaactgtagcctgtgcgccttgctgacgatggtgctggtgacagaaatgcatttccagggttacactgctacttatgtgaggaggagaaggatgggaggaggagggtggctgaggggtggccagcagccccaagggctgcttcaggtacatcctggtttcttgcttattgcataaacagggcgcctttgtcacaccttccctttgctgtgagcaaatgttaaattaagctggaattgaataggtctgtaactaggtatataattcttaactgggatggtttgggaatgcggtattccggtcaattcaattttccggttaccttgttagaaacattataaaatgtgtttgctcatattcctgccttagaaaattcacaagagtgaattgatcattgcaggcatttgtgttggttttggcatatcattttacacatcagtgattgttgccttcccctgaagatataaaatgtgtcctggcctggagcatcccctaagagttcaggttgaaaaaaaacctgcccactttctctaataagtgtagagttttgatttttaataattttttggataattgatgttttatggatttctattcaagaaatgaaggaaaagggaatagaatttgctactgggttgtatagctgagagtaagtttggagagtgtattagtccgttttcacattgctgataaagacatacccgagactcggtaatttataaagaaaaagaggtttaatggactcacagttccacatggctggggaggcctcacaatcgtggcagaaggtggaaggctgaaggtgaaaggcacatcgtacatggtggcagatgagagaaatgagaaccaagtgaaaggggtttccccatatacaaccatcagatctcgtgagacttactaccgcgagaacagtatgggagaagctgccctcatgatttaattatctcccaccgggtctctcccacaacacatggtaattatggaagctacaattcaagatgagatttgggtggagacacagccaaaccatatcagagagcaaatggatccgccttaagagtaagtggcagatctgagaaatcagcttgtttgtttctttgggatcaaaaggctcttagagaaaacctagttagaaggtcctcccgccccatttccccagtcttcatggaggagctgcttggatgccaggaccaggtccctggtgcagcaagcctgctgcaacattgccaagtgtgggagagggaccgggttttgggcagcaccaccttggccttcctccttcttgtgtgagaagctagggatgaatgtgtgaaagcttggagcctagcataccacatgtataagtcagagccatcagtccctactgtggtgactcatccccttcaagaatcagatcaaagctgtggactcttcatactggaagcaaagcacacatatgcacatgtgcgcgcacgtgcatgcacacacacacacacacacatacttctgtatataataacttcaaggggggtttgctgccaccctttgaattccttacaatattgagaactcagctaagtagtttagaaggcctctacgatatatatgtgtttgtgtgtgtttatatacacatatgtgtatgcattactgtacctatatgcacacacctacatatatatcacatatatgtatatatttgcttatctatgtgaatgactaatatcatccaactggcatccaactggttgatgctcagtattcagtatcaaaggaatcccaagaccctgtgtgcttatgagcatttcatttgttacatgtgcaatttaaaaacatttggtgcttctgtctagtttgaatgttacttataagctgtggcagaaattctccttttgcaaaaaatataagtggattaaggctactcaagtgggaccatccagtagaattctaacacaggtttagtttgtctttgctacattctgtcatcttcttccttctttcctaccctctgctactctggttcctaaatgcccccctcctggccagtgccctctctccacatcgtgtccacatgttgcttcatcttctctttagaactccagtttctgtttcataatcttagctatgtgagtggctattagctggatattgggaggaaatcagagctctagagctaattcatactaaagtgtgaataactgattacttcaaattccccatggataggcatatttagaagaggatatgtcttaacccaaatcaatctcaatctactgaatttgatcattgcggcaaaggaagaattttaagcagcaatgtttaaaaacaacaacaaaaaacccacaaatggctgcaggaaagaaaagagcttaggagacaaaggatgataaatgtgagtattgttcttcatgagagaatcacttggaaaggtttgaaggcagaaaccaacctcaggcactagggacagaaaagggagaaaactttatatgcagaatttcaccatccttctaactggaggtttccatgattgggaagaaattgattttaatcctttaatccttttttgttgattttttaaatttttatttatttattttagagatagagtctcactctgttgcccaggctggagtacagtggcatgatctcggctcactgcaacctctgtctccagggttcaagtgattcttctgcctcagcctcctgagtagctggaacttcaggcatgtgccaccacgcctggctaattttttttgtatttttagtagagactgggtttcaccgtgttagccaggatggtgtggatctcctgacctcgtgatccacctgcctcagcctcccgaagtgctgggataacaggtgtgagccaccacacccggcctggttttaatccaattttaagagataaacctagtctctaacctgaaaaggcccatctttctatcctagggacagatttgtcaaatctttgatagattttaggtgtttctgttgtgtaagaggatacctgatgggaaggaatactggagctcatatgaacaaagaaaagttgtaaatctctggaactctctctcccatatcttttctcttatgaaaataataaatgcttttccaagagaaagcagagagaagaaaaatatttctaatactcttgccagcctgcaaattaaaacactcttaatattttgatgtatttccttccagtattctactttttacatatagggtattttatatgctgcctcttgattttatagcacctgcattttccatataattacatattcctaatgaaaagtactttaatgactacctaatattctcgtagcaaggtgttgttttgttttactattattcaattcacaggtacatgtgttcccccacgggggttttggtttctttagtctaaagctctagaagtagaaataccaggttagagtatgaacatgtttgttgaagggtctctgagacctattgccacatcactttggcaagaggttattgcagtttactctgctattggagtgaagcctgaagcatcgactttgaaagacatcagagctcctacttctcagtcgaggggtatagtaagtcatccttgaaagtggaaaagagaaaaagatggggaaacggggactggggctgcttcataacagcccatcaggtgagtgctgactttaacactaatgctttcctctaaagttgcattaatttgctgggaaaccataacaaagtactgcacgttggatagcttgaacaacagaaatttactatcttacagttcaggaggctagaagcccgaattcaagatgtcagtcgggttacttccttctaggctgtgaaggagagtctgttccaggtctctctcctggcttctggtggtggctggcaatctttggcattccttggcttggagaatcatcaccctgatctctgcctccatcttcacctggcatctccccgtgtgcatgtctgtatccaaatctccccttggtgtaaggacatcagtcatattggattagaggcctgccctactccattatcatttcatcgtattacatctgcaatggccctaatttcaaataaggttacattctgaggtaccaggggttaggacttcaatacatgaatttcagggagacatgattccactcataacaaaagagacccactaggcactagggagtgagctactgcagagtggccccacaagcaagtcacttgtttctctgggcctggctttctgcctctcaaaaatgagggtgttggactagagcagtggcttgcaaagtggggtccccagcccagcagcatcagcatcacctgggaatgtgttagaaatgcacattctcaggccttaacttagcattactggatcacaaactctttggtgggggctcagcagttttgtgttttatcaagccctccaggtggttctggtgctgactgaagtttgagacctactggaccagatgaccctctgggtaagaattctgaaatgtcaacatctgaaacatgtgtgcacaggagttcactgccccatgcacatggcctgccatgagggatgcaagcctagtaaatgatcgcagccaattttttaaacgtaaatgataatctagtttttgtcctaggtgagtggctatgtgacaaactccaaagtttttacaagtccctactgttctttcagtgtgcaacctgtacctccagaaaaatacattcactcaaagtaatgtttattgatcaatgaactgtaccagaccctggacgctattccttttgcataagtgtgacttgtttttgctaagctttaacttgtcccctgtttatttctctttcctaaggcataagtcaaggccagcgagatggcttggcccacggacctagatttagaaacatcctgttattgatgtatggattatacatgaaggcctaatggagactgctgtggggttcagggaagaccaattagggaattaattcattagagcccagcatacatgttgctatatctatttacttatttaggttaatgtcttttgctgatcttcttacagccataagtccctgtcaatagttgataatgtacttgaatttccttcagactattaaaattttacatattggacatttatgacaggaaccaaagtttactttttgctttgacatcctgatatctagggtcttctgtatagtaataaagtaatccaagaatctgagccacacactggccaatcagttttctctgcatctgagatcaccaaatacacttcttttctagccattttacctgtatgaatgtgttggtaaccttgttataggacaaagctgtacatagaatattgcttatctcattcccgtatcatcaactgcaggataacatctgctttgtttctttccttcgttccctggtaagacaccttatttgcctctcattcttcatgattgtgttttgtcccttaatttttgatacaataaccaggggtccttgttgtcatgatgcccatgcagtctatgcaaaagaaagattattttagtgggaagatcatagatgtgggtggcagggagcttgggttccaacctccacttgttgactaacttggtgaatctgggaaggttacatcttcctctcttctttcaatctgagttgtgaggtggaatgagacctgttgtacctgcttttgagtgagggcaaaagagatgcaaaaatgaaattgtggagatggcagtgctttgaacaatacaaagtggtgcactgatgccaggaattctatgcatatccacacacatttgaaatttttgtccagttcagattaaagacaactttattattaccattaaatctgcttacagagcaaatatgcaaatatgtgtgtgcttaatggtggcaggcttgctttaatccttcttgctttggggttctgcattttattttctggtgatgcagacctggtaatgatcactactgatatttaccacattttattaatgtgatttttatgatcctgcaggagataattaggattgggtttgtttttttcacgttcatattatgaaatttcgagctacatagtgacatggtggggaggagggaaatagcacagagaaggaatgcgttacaaataaactcaacccagaaaccatgtttaacatggattaaaatgaatgtagccctgtgttcattatttatagctattatgcagaaaatatgttactggactctcaagaattggatgttaagaaatgtttggttcctccctttggaaagcatccaattaacacaccatccagaggagacagattggggggtcaaggtagacaggaaacattttctttgatttacttattttaaaacctttatttaatttctaccatttaataaaatcagacattagatgaattgaactaataaactgtctttatatcaatatgagagtgaatttgaggccaggctctgttggcatagccttatgttttgtttccttttaaaatctgttcttagactagtaggtttaagcaaagttttatacataagatgatcaaactggtggaattaggaggacagttctatgaccataaagcagatctctgcagaaggcgttacccccgtacatgcacagagaaggttctcagtaaactctcatgtatagaggctagataggatcttggttaagagtgcctgatccggagccagaagacatgcgtttgaagcctagtggttttgtttgtttgtttgtttttgttgttgttgttttgagatggggtctcactctgtcacccaggccggaatgcagtggtacaatctcggctcactgcaacctccaactctcaggttcaaacaattctacctcagcctcccaagtagctgggattacaggtgtgtgccaccacacctggctaatttttgtattttttggtggagatggggtttcgccatgttggcgaggctggtcttgaactcctgatctcaagtgatccactcaactcggcctcccaaagtgctgggattacaggtgtgagccactacacccagcctgaagcctagttttaacatgaactatttggcacccttaagcaagttactttagcctctttaagcctcagtttcctcatctgtaaaatggagaaaacaatagcacctaactctaagggctatagaaagaagtgaggcactgcagcatctgaagtatttggcacctggtacctaacaagctgtcaaatattaattattgttgcttatattactatactgttacaataattattagtaatcttactgagtaacaaacattacctgttgcataaactaggtaggggcagtgtggcagggaataagacaagtaaagagtttggattcataaccatttgaaatcaattctaaattatgagaatgtatctttagaaatatattttatgtttatggagcatgactagtttagaactgacatttaggacttctaaactttgtaaatgaggtatgcttagatgaatggcatcccaattccatgagtgggctctttacttctccgcactccactagtgaatttgaaggccactgtgaaaagaaaaaaaaaccaaaactctacttgttgggctctgtggtgctgttatggcttggcccggctcagtttcctttctcttcttttctggacaatttcaggaccatggcatcttgacttctctaaaaatatttatttagtaagtctttaggtaacttcaaactctagtcttgggcttagtgaaacagaaatccagaatcctagatttctccaaagtgagggtttgtggctgttgtacctgagctatggtgcccaatcatctgtcatccctggctccttgacactgggtttatacacattatagggaggcaatggagtgaagctcagtgaagcccaaacatcagccattcatgtagcaaccttttctgcttttgctgtattgcttcataccacctgtacccttatctccttaatatcttctgcaattctaatctagcatatcattgcttattaccttgtcttggcctaagaaataagatctggaaaatcccagggtgcaatgctagtttcatgtcttcctatcatccactaaagtagctacataattgtgaaaatttaaatgtttatctgtgtatcagcaaaagagcccttgtgtcccactgatgggatatatatattccatgttttgggagatgtgggtggacgagagcctgggtgtgaatcccagcatttctgctctctcccgctcactagctttgtgaccttaggcaggtttcttcatgactctgaatgtagtttcttcatctgtaaaatgagggtgaaaatacctcctactttatggtgtgattttgaggattcaacgaacccatacgcggaaagcacctagcaccgtgcttaggaaatggtcatttctgggtggtgggaacagcatgcagcaagtctgctccttggtcctctatcttgctgtcctacccagtacattgttcattccatgaaggcaggggtccttgttattcatcatttgggtaactacacagtgtctggaacctagaaggccctccaaaagttagctaacaaatgagtgaatccattaaattacagttgtcccttggtcacctggcatgggcaacagtgctttaggagcagtggacaaatacttgtggggctgaggggaatgtaggaaagagcagatccttagaagttagagattcttgagttcaaatcatggctctgctatttattggttttgtgaccttgggcaaattaccctgcctttcaggctatgcttaccttgtttatataatggagataatgccctgcgaggctattatgagatcaaacaagatagggaaggtacctccttagcacctggcacccagtagatatacacccaactaatagtatcccttagcatttgcaccccataggaggcaaggctgttgccttcacacagtgtgtgacaaagccagtgagttgttcagatcaggcatatggtagggactttgtaggaggctgagctccctttagactggggtagtcagtacaagtttccttgaggtgttggggtttgccctcgacttgcaggaggagtttcaggttttgtgcggtagagctgagctctccaatccctcgtccctcctttgtggcacttctagattttccagcctcaggcattttcaggtatgtctaattcacttggtctattgctgaactcccaattaaattactgtattctttaattacatagcatcttaaactgtagctttgaatttaattgaactttttcatgctccttgctccctagccaaacaatttgtacaaaaaaaaattgaattaacaatctgacttttttttgcattgattattataacattaagagagtcccaggagtttccaggctgtaaaaacctaaattgtataacattactcacaataacgcatatgttataatcgcaaagaacttacttaaaattcaatccactttggcatcattatcatgtatcaacataataaatgagtccttcagagcatggtaattataatttgataaatcatcagcagaaaattaactggatgtcaaaacattcattggagagggtgatgaatcggggatgattgtggtgatgaattgtgttaatctgcacagtatgaagccagcgaaatggctaagcagcccaagatggatggggcacagaaccggcaaggtcaggacacagagctgggagaggagggaggcggcgggcaggggtgggggaggagctgaggaggggaagaagaaaggaccagcagcttccctgggaggcccacgagttaaccctttccccacatcagtggagacagggccccgtgaagagcctgttcttgagggaggtcaggaggaacctgtaatgtgtcccgttccatttaagacccccttccactccctactactgcctcctgctaactctgtgggtattccttagattaaaggcgaagtgctgagtgaatgatgagaagcctagtaggcctgacagttttgcattaacctaaaaattttctgatggtggtgagggagggggcttgttggctctgcagtgggagtgctcgcagcatctctccacctggtctgtggtcttggtggacagggtcaagcaggctcaaaaggataggcctgtgaatcatgttagtggggagctcttgtgagccccactagagctgtaaggacagagggacccttccggaggagtggctgctcatagaagttgtggggctgatctgtgccccagcagcatggaaaagggaggcatttctcttcctctcaaaaatccacacaagcagctacagttccttggccgggagaccagcccatctttcaccaaggaagttttgcaagggctgtaccatggcaggcttctctctaaagcttcagtcatgagaggaggttctactaagctcttaagttccagagtgatagagggaaggctgcacattctagaatgttccctgtggccttgcatgctcaagtgcctctgtagcattaggggcttgccggatactttctaaaaaacagcattgccagagaatgtgggcaaaatacttatccaattaaactaggagccaccataatgtgcagggataagtcagcttaagggctaaaatctggggaaataagggccaaattgatgaagtggctatcattaaaaactgttgtttttcctctcattcctgtcccactagagattcatacccttaggtatcttttggagggtgaattagagcatggaatatgaaaaaagtgcagcaagtgagtggaaaaattgtttgaacatgaaaacaaacctagaaccttgagggtactatagctgtttatgtggctattgagtttggtaaatttgtaattaggtgagtatgggttttgtttctgttttatactgattgcttttagccctcagcccctcattaaaaataaccattaaacaattaaaaaaaacccttcaacttgggtaatataataaagcccaggcctttaaagaccaatggctttcctaagccacactgacagccactgttggctgttgcaagaaaggacttgtactctctggcttttctctttgcctcttgggtgaatctggtgcttccctagatggttgtctatgttgccttaatatctttaggggaaaatcccacaaagacacttggaggtttgtcctgtggtcatctggctctcagctgcttcttttctttgagtctaaagtctgttttccttgcttgttgctcgattgagcaactacttatgttgtcggtccagtaataataaccttaccaataatgagaatccctttgacatgtatttggcattactgttctcaaagaattttcacatgtgtttaatcatgttaacagccatttttgggttctctttcctcctaagcaaggagacagtttcagtcaaaaattctcccccactggcatgtacacctgatgtgatgggcatactgaggttcagcacagtggagctgagctggtaaagcttctggcttacatcaatttatgttcacaagctcacgcttattatgataattttgccatgtttccttttttcttcttggtacctttcatcagttttgacacctttagaagcatcagcccaatgctttaattttctctttctgaaagaaggatgatgcctttagtagcatcttaaactatgtgtcaaataggcttccctggactttttttaggaaactcaccaccatcagtgacattatttcttgaggaaattgagctctgagtcctcagacccaatatttaaatataatgtcttccaaaagttagcttgtacattgggatggtgatggactggggtgaaactttgctccaatgctgatatcatagacagtatttgggatatctactgtgtttatcaagggctctgtacaaatggaattgtctgagatagacctcaaagattgtgcatgctaccatgagattcaggttgaaagataaaatcaaccttgatcatgtggctggtttgacctttgccacttgatgaccccaagacacatctactttttttgaggtgtccaataggtagctctctggatacttgtatccacttctctctaatcaaacactgatcttccccctagtttcacctttaggggtagtgtgatttgtggaaaaggagtgggctggagactattagattgagctctggcctgaccaacagctagctttggggccttgggcccatctcttctcctgtgtgggccttagtctcctcacccataaaagaaagagatgaaacattcatgggatttcagacctttccatggtgccaccacacaggtgagctgtgatggggactctgagccctttacctccccttaagccccagcacttctacctttatctacttgtatctgcattctgcaaaggatttcatttgggggaaaagttctgctgctcaaacattcttgaaagccaccttcattttctctcccatctagttggtactttaattgcttgggtcccactgtgcatcatggtgctttctagcttgtgcattttatgaggccagcttatgggattgtattctagttgcccaaccctccttctctctcaggtacccctggggaccaaaagttaggagaaagctgggaaacttgttgaagagcttaggaagggttgaagatgggcaggcccagtgtgggcttggaagaggatgggcacagaggaccacatcctttttactgtgtcttcttattcctatccatcctaatctcagctccgtgtgagctgacttgcacaagaagctcttgagtcctaacttccataacatctaaagaagtagtggtaccttctatttgttcagtgtttaaaaatcttgaaaatactttcacagccattgttatattgggtattctaaataacctgagaaggtagaaagggcagtagttgttgccctgggtctagagctggggatgtgaaggcctggaggaggtgaccaatgagccctcctcagtgacagtaaatgtgaaaaccaggacccaggcttttcaatcctggtccaatactattccctttgctcttccatagtgagtggtttctcagcacccctgagtcagtactgccatgtagagatattggtgaaaaggagaagaaattcacattggtctgttttctccttcctttggacatttccttcttccctttctctccccatcaagaaaaatgtcttttgttcttggggtagctatagacagcctccccgtctgctgttttcccttctctcctctcgcagcaggaaaacagggtgattatggggccttctcttagcggaggtgttaagggtttatgtagtgcttgtcaatgaatggctaatggactcagttgggttgtttcaatgacagtttcccacaatctgatactaaagtggaagccttgagtgaagcttttatcactctttcaccaggctcatcaagaacttccttttcctctctggaaattgtatttcatgtggtatatttctaatccaagtgttacatcaatcagcaattcagtgtaggcttgtggttctcctggagcattttacaagcaaggatggggtttcttattctggccctcttggactcttggaaaaacactccaactgcaatttccttccatctattatgatctgtttttttagttgctattagaattattgggtatttcaagacattatcttaataaaggcattcctttctgggctgtgcttgacctgtgggtgagattgggaatctgtttcttctcatggttatagtgaagttagggttctcagaaaacccaacaaaatgggagcctttgaaacatgatctttttggccaacgacttctgtgtggttaaagggttgctggatgtcgtcagcctgtggatttccatctggagagtggtttgtttttaagaaaaccctccaaatgatcagtctttcatatttcagatgtcaaagaaagaaacaagacatttaaaataactaacactagaggaaatattggctggcaagaaagggggagtgagatctggctcttggatgtatcgcttcagctgttttctgaatgtttgacaaacacatggcttcgatgtgctagaatcatagcagcccagggatgatgactaatatggcattagttggttataagtccacttaagaattagcatctgaattcatgagctggtttcagtgaaaggaaagaaggagactttggagtctggattttggagtttgggattttttttttttaatgaatattttttaaagagcgagaaaacctctccttaaccccagggaagactatctagctgacattttcctctatggtgtcccaaggaaaaaacttgtccccaaatcctatcctattcatataaaagactgagattaaaatttgggttattttccccttctcattttaaaaattcatctgaagcgtttttgaaaaacaatacaaaaaacctctctctgcaactgtgacaggatatagcagctgtctgagaattttctctttttttttactgttatcttttctctctttaagaaaagagtcgtttcagaggcagccgtgacagctctgtcatttcactcacacctctaaatttctctttctgttgtcagtcagcagacagcaatctctggattctgatgggcctgagggatgtccaaatacatgagagatcggagagaggcctgcagcagtgtgcgtcagaagccgtcatcttctgcctttattcttagaggaattgtcaggagtttataaagttctcctgtgctgggatctccaagtctcctctgccaccatctacagcccacacaaataggcatgtgaggggctggggctggggctggggcttcctggaatgtcacttctgcaagttccagttaagaggttgtgttgagttcctctaccctgtgtgctacactggggaaattaagactatattgggagtaagtcctttcaggacaaaaccactttaacaacagcagcagcagcagcagcagcagcagcagcagcagcagcagcagcagcagctactcctgtttacgtgttcttatgttctaggcactgtgccaagtgtttcacatccactctccactcattttccagtagtcttgcagtaggtactatttttcatcccattttagtgatgaggcatctgaggctcagattcattaaataactcaagtaacttgcctaaggccatgcagcaagtaagtgacagagctgggattcaaactcaggactatgtgacactgttgcctcaaggccttaagccatgtgcagttctcatatgccatcattgtctttttttccactgtgtaaggagacacagaaatcataatgacctgctggacaggtgaggcctgtgcccttgtccttttttttttttttttgggacggagttttgctcttgtggctcaagctggagtgcaatggcatgatctccactcactgcaacctccacctcctgggttcaagcgattctcctgcctcagcctcccaagtagctgggattacaggcacctgccaccacgcctggctaattttttgtatttttaatagaaacagggtttcaccatgttagccaggctggtctcgaattcctgacctcaggtgatccacccgccttggcctcccaaagtgctgggattacaggtgtgagccatcatgcctggcggccctcatcctttatgcagtattatggcagctgaattaagatgaataatgacagcaccgtgacttgggggcggtggggtagtgggggtcagaagtaccccaggaggtggaggagaaaggccacctgaactcaaagggaaaagttctatagttgaaagcaacctggatttagagtgaatctctacaaaaggggccccaaaatgcctgaccatgtgagcttgatataggtcttttgtggagccaaacttacctattggtctgagctctcctgtcagggcttggcacatagtttgaacaaccccagtagtcgtcttatagatgttggcaaaactacaaacaacacatttttcacttttaaaggggccagttttgcatcttctatctgtggtattccattgtccccagttttcttcttctttcttctgttaatttcccctgcagatatagcatctctgccatccacaaatgtgtcttggttccacctaactgttccctggggcaacatggaggggaggcaaacacaccttgctgagcctgactttgaccatgactcatggtgttcaggcccaaagcattcaggggatgagctacacagcaaagtgggatgctcaacattgctacctccaaaatatcattgttagtcatttcctttctggagttagactgcttgagtgcaaatcctgattctacctcttagtaaacctgtggccatttgggtggttattgaacttctctgtacctttgtttctttgtctgtaaaatgaggatagcagcacctaactcatagggttgctgttattgataatcatgattattgcttttatagccttacactaagggccaggcctattctaagagtttcacattcatgaactcattcaatcctcccagcagctcaatgaggtaagtattgctttttcctcattttgccaatgaggaaactgagttgtagaaaggttaagttatttgccaaaagtcagacaggtagtgagcaatggaacagagattcaaaaggaaggattctatgctcctaactgccatcctgtcccctaaaatttcatacctacaacatgcttggcataatacctggcacatagtgagagtttactaaatatataccatagataataattgcagtattattaacatgatgaggattaatgcaaggcactgtattagctgctgataataatgatgcacaatccccaaaaagttcacttgtgtatttaaaaaccaatgaggaagatggatgctttaatgagcgatgaccaccaagtatgtacaagctatgacagatgatctacagatgctatggaaggaccagcatttctttaaataaaaactactggtaactttcatcttaggtcaggcattgtactaagtcctttgggacggagttattttactgaatcctgcatggtagatgctgtaccataattatcccattctgtagacactgaggactggagaagtaacttgtctaggtcacgcagctctagggggctgaaggccctgggctctaagccactgtcctactgcccaacttgcctgagtgcctctacactgatggttgtttcccaggacttcctgatttttttctgaaggatggaaacaaagacgacccaataggagtgaggtcattacctccctcccattctcccttcagcaccagatctccaggagatggttcagtaaaacagcagtgaattggatagaggaatcgtctctgtggagtgactttccttgtttctttggggtggaccattctgggctttcctcctttacacatgtgctcatgtgacactctttgtggagtgccagggactgtgtccttcgaggacagattgggtaccctgttttctgtggccttccatgaaaactgcccatggcatgctctcctttctttgggccttgaactctgaacgatgcacagaggcacttctgtcacatcttcctttgattctatgttgtgtgtattaggctgctgtgactatctctaaagttcttttagaatagaaatcatgtctgctcaatattctacagcatctgtctcaggctgatgagcatcccaggcctctccaaaatcagagtcattttttctttctttctttccttcaccaccgtttccaattcatcacagagtcctgtcagctctaattctaaaatgtttcctgaatctcttccaccaccaccctgggccaagccaccattacatatttctgggacaacagtagtagcttccaaactgctctcttccttttcttcttttcttcctacaatctatttgccacatggcagccagagtgggcgttcaaattgtcaatcagctcctgtcactctcttgctgaattccctccagcagttacctgttgcacttggtgtaaaatccaaagtccttccatggcctacaaggcctggtctggtctggtcctatcaacgtctcccacttcatccctgcagaactctctctactctgtacatgccaggccccttggccttgtgtggtcactcaaaaagaacaaacctattcattcgttcattcatcttagaatctttaacaagctattccttttgtatacaacattcttggttaagttggtcccttcttatcttttaggtctcaactcaaatattgccttctcgaacactcatataacccacttataactggcagtctctctctattctgttgcttttttgttttcttcagatcacgtattattatcttcacaagtgctgtttattcatttgcctaaatgtgtattgtctgtctacccccagtagagtataaactccatgagccagggccttcacctaccttgttctttcaatcctatgccccctgcacctggcagaggggctgaaccataatgccagctaataactaataagcagttaatatttgtcaaagtattactatttgccaggcattgtcccaagcccttcacatatattaagccatttagtgtttacaatgaccacaggatgtggatattattattattcccattttactgatgaggaaactgaggtatggagggtttatgaatgcagtagctcaagggcatacagctagtaagtggcagagtctggattcaaggctccagagcatgtgttcctaatcgccacattacaatgcctctctagtagatactgaataaacccttgttgggtgaattaatgaatagaagatgctcagtagagctttgttgggtaaacacaatcatggattattgtggaaatgtcttaggcctgaacattgtcaacctccaagagcagagggcatggcactgtctacgtgggtatgaaatgccccataaccgtaaatggggtctgctcacaccacatttgctatttatactttatactagatagagccctctagctcgatggttcttttcttcccttttttttttttttccttttttaaagagaagagaattgtgggaaatattttgttttccctgggagccagactatgtatttacttcaagttttattaaatgagttataaattttcccagcaatttactcatagctcaagaggtttaatttgcatgtgttgccttttacaatatgcttttcgtaatgttgcagatgcttcttccccagcttcagtaaacaacaggcactccgccaggtttttgactgaacatgtgccaggcctgggaaatatgagttaactccatggtgactgttgggggccacacgtccccctctgtccagggcatctggggagctgagtcgaattcctgaggggcaggagcaaagattttctgaatcttctttttggacatctttttaatatttttttccacacgcaaaataaataaataaacagacatttctgcctaagtatcaggtttgcactggtcctaattagaaagtagtgttaataggatgacagaaagcatttgctagggcccccagggtgatctctagagaggctaaagtcactttagcctttggggagctgcccacggcctatgatggtgaagccctttgagcttcgaagaagccagtccctctgagggtccaggtctgatgcctgtttcatttcaggtagagagcctcagggttgagaactcatcttctggtgtcacactgtcgggttgagttctggctctgccacttattagtcgtgtgaccttggacaaggtacttaacctctctgtgcctcagtttccgcatctgtggagataatggtcataatggtccctgtcttgtaagtttgttgggggaattaaatggaatactgcatataaagcgtttggaggagagtggtttataaatggacacataaatggcatgctgattgtcccagggctattcagttcattggctacaacttaggggacagatcctctcagtgagttattcctggttggagatggagggcactggagcaagggatggatggtgtgttcattagaatgaggcttagctgcatgtagcagaagagctcaagttaacagtgacttagcattgtagagatttatttctctcacataaaaggagtatggaagtattgcagggctggtgtgataatttcatggtgtcatgaggaaccctggttccctctctttgtagctctgacattcttagcatattttctcatgattcaagatggcagcttgtgctcttgtcattctgtgcgcattcctccctcaagaagcagggaggaggaaggaacaaacaggagtctcattacctcttaaggaaacttccagcaagtcccacgtaagacattctttgacatctcattggccagagtttagtcacagagccacagctagctgaaaggaaaatggaatcgtttagcttggcagccacatgccaaataaaaatccaggttctgttacaaagcaggaggtggagaatgggtgtggacgcagtgaactatcagtgagtttccagtattgtcctgtggttttgtgacttgaggttgaaggaattcccaggtacataaagcagtattaaattttgtttcctagatgattttaggtggcacaaatacattttttatttgaataatcttataattttttgtatgcaaccatattataattacatatcaaacccaggatttcacagatctcctacagtgtgatacaatgttataatgtttttctttaagtctaaatttaactgcatcaatgtttaaaaaattaagtaaatgccggcatatagagatgagccaggcaatctgtgcagtggctaaatgtgggtcctggggcctgagtttgaatctgtaacctgccacttattggccaaatgaccttggactttccatgcatcactttgcttatctgtaaaatggcattaataatagtacccatctcacagagttgtgataaggaccaaatgggttagtacttataaagctctaagaatagtgccaggcatgtgatgagtagcccgtgaacattagtcattgttcttattgttattatttctgttgttattgttattattatggcttatattactgctattattaataataatgattacaatagatgacatttgaatagagcagaaattacaagggtggtacatgcgtgactgaaattagggaaacactggcttagaggagtgagattggcagttaatcaggagagtcttagacacagctataaataatgactttattaacaattaaaactagtgctttatgtttaaagtggctccatatatgataataacattgattagagtttattgaacatggtgccaggtaccatggggtatgctttaaatatattacttttaatttttccagtgctgtaagctaagtgttctttttattctatagatggagaaacttagtctaggatagggttaagtaattttcccaacatcccgtggggaccagcatcaaggtccctgctgataaacgcatcttgtttatgtcctttttggtgccctttcttcccttttccccttctctgtttggatgtcaaggaccccttcattccactcaggaccctctgatttcccctcctccccatgtttcttcccacaccccaattaccagctagtccatatgtgccagctgtttcccaggtcccttcccactctcagaactgccctgtccatcatctgtgttcctgcaggacacaacaggcaaaagctagtctaatgaactaatctatgaaaatggacattaatagactaatatgtagccctctctgggtcatttattttagaatgggcttgttgacaaggttttgtttttttcttctgaataatttacttttctctctctttcttcttttaatagactttattttttagagtacttatagttcacagcaaaaattgaacagaaggtacagcaacttcccagatacccactgtcctcacactggcatgtcctctctcactctcaacatggacttgaggtcttcactcaaagggataattcgtgatggagattaaaggcagcaaacagttcagtagccttgtgggtctgtcctagaatgtctcctaggttattctttaaggttttttaattgctgtatcataggatcctgacaaaaatgggacactgagatgatgaccaaagggatcaagcacactggtgagtgatcagtcaagggccctgctcccccttctccagcacccagccctgtgtctggcagatggagagcacgcagtcaatactgttgaatacatgaatcgcctaccaggggcccttcggatatgcagggaatggaaggtcctttaaggaatgggacagtgacttacagtgggtaaggtttggttgggcctcgtgaacttgatagatttttttggcaggggggctataatgttctgtcatgcaggtcagcttgctgtcatcctggacccgtgcgtgtctggctaagtgtgaactgaacatgagcagcatgatgcagggattaggggacattcatcttccactctttctctttggagctggaggctcaatgtgttactctcatgatgtcacaaagcaactgatgtcttactacatcctgaaagaattatttcctcttttactcttcttacaaattgtacctcatgatccattgaatttcactttcctatttttccaacatttctcattttctgccctttttatcctctctctcagaccattgggggaaggaagaaatgttgcttagcaaccagaatgaaactagtcaatactgcttctaatattaaccctttggtaacgtgtgtgcgtcccaatccatgtgttatagaactctcccctagcatgttttaaactagaacttcatctaaagttggcagctcaactttatgtcaaatcacaaacatcaaggatatatttgtgggttgttataaatgttagcaagttccagtgttataagttatacacattgtctgcttattaaagtggttcacttttacattcttaacttttgaaatttgctgtgactatttcacatgttactttcactttttgaacaaaatagtttctttgctggcttggtgtgtgtctgtgtgtctgctggtttgctttttagacatttaagtccatttgtctgacaattggaagatatgttttctgggttgtatcattcattcatctaatgtttattgggctctactctctgccaggtgccatgcagggcaccgtggagtattgctgacttgggcaaacactgcagaggttgagcagacttggtttctgtatgcatcttttcatcagcaaagactctttttcccttttcatcttcatctattgaaataacatataacagggtgggttttcagatgcaatagttactcttctactggaatggtttctttggctttgattggacaatattatccatacattttaagctctttgagagtgagtgggccgggcacggtggctcatgcctgtaatcccagcactttgggaggctgaggcgggcagatcacgaggtcaagagatcgagaccatcctggccaacttggtgaaaccccagctctactaaaaatacgaacattagctgggaatggtggtgggcatctgtaatcccaggtactgaggaggctgaggcaggagaatcactcgaacgtgggaagtggaggttgcagtgagccgagaccacaccactgcactccggcctggcgacagagcaagactccatctcaaaaaaaaaaaaaaaaaagtgagtgagtgataggatggaacaaaaagataaatattggccagctcctctttcatacaccaggtacagctggtgcacacacacagttaaagtttgggagtgttgatttgcccgacataaaatcatgttggtgaagttggcctccagtgtttctcttcttacatatgtgcccccctttttgctacaggtgacctgtcaaatctcccctgatatccagcactctcatgccagtgaatgccaccctcaactgggggaaacagtgaactgatctcttcttttccttagggcattttttactttattgaagactctctacaaacacagtgcctttgggggtgaaccagaatttactgtggtactctacacagacagtaggctgagtgaaagctgaactgattggggttttcagattgcctctgtcttctctcacttggaaaggggcgattcccccttacattccctctcacttctggggtgcctagtgggtgatatggttgaccatccttggaccccgcattgccttgcagggtaatgccagttgggttactcacattctctgggtccccagagttcccatacacgagaccattgtggagttgtgggggttgtgtggattccccctgttagcttgagtggccagtattccacaatgcttgggcttggtctctgtgaattggttgggtggcaaaaagtatctacaatgactagattctgtaaagcaagctaaaggtgaagctggccttaatgattttagcttatttgttatctaaaagatagtggtgacctaggactcatcaaggtgtggctttgaactggagtttggtagatgtcttcaaaaaggcatccaaaacacctgagattattattacatggtacttgggttcttgccttactttattcagaacagaaaaggagagagaacttagagacacaggaccgggcatgagcttaattctagcagcttctattgttgagcacccactatgtggcaggcattgttctagacaggtctattgcatacgttatcttccagcctttccagcagcctcgcaaggagcacattcatatccctgttttgtgggtgaaaaaactgggattcaagagagggtaaatatcttgctcaaggtcacatagcccacatggaccaggcagggatgtaaatgtagatagggtctgactctgcatcctgtgcattctctgcaggaccacattgcctcctttgcaagtcaacctccacttgaaggcaggggggagctcgggttgtagtaaacaatcctagatgtgagtaatgtgggcatccagccatcgaagcctgccaggacagtttttaccatgtgaaagcacttagttgttcagtaggtcccattgatcagctaaaaccatagcaggaacaaggaaagggctacaggagccaaataaaaatttcacattcactaacttggaaagtctttcttcatttctcatttactgcattgctgtatatctttccatctcttctctcgaaacatgatcccagtttactttgaagtggctgagtgtggcgggggttctgtgagggagaggtgattctgacgatgatgatggtcttacctgtcattgaatccttcacatatatgtgtgtatatatgtatacacatgcatacgtaatatccccaagtcattttcatttttccttcattagctctcacttacaagttatacattttcaaatataatatgcgtctatgtatgtgaataggtatgtgtatatgtgtgcatatacatacgcgtacatgtacgtctccaatgcttttcttttctttttgatacagagtcttgctctgtcgcccaggctggagtgcagtggcacaatcttggctaactgcaacctctgcctccccagttctagcgattctcatgtctcagcctcctcagtaggtgggattacaggcatccaccaccatgcctggttaatttttgtatttttagtagagatggggtttcacgatgttggtcaggttggtctcaaactcctgacctcaagtggtccacctgccttggcctcccaaagtgctgggattacaggtgtgagttaccacgcccggcccccagtgtgtttttatttgtcctgagtttcctttcctcctcacaatgctgctccccatgcagggagccggccaggcagctctagggcagggggagtgaacagggaaggaactagccgtgcaccacaaggtcgtgtgagaatgtcagtgtctgggcatatcacatggcaagtctttccttcaacgacatcatgatttacctgggttcttgctgagctaatctccctgcagcaagaggacactaagtactggccgtatggctggagaaagctgccctgggtcctgcaaggccaggctgcctggaattcttggggatctgtgccctgcggggaggatatccaaaccagcaggtggaggaggagaaagagacaagagctcaggcctacgcagagcttccctgctggggcctggtctgctgagtgggaaggaacagtcaaggccatggagccgtcaacttctctgccctgtgtcctcctggaagggaaagggaaggcctgccagggcctgcagagacaagcagccatgtggctggtcacggtccaagggaacgtgtcccactcacagggcctaaagcgggaagaacacctccttcatgctgcatgagcaggagcagatagtgtttacctcttttgtccgtggccctgtgtgggggaccaagggaccgcatcatcctacataagatcagcgcatgtcacagccaggcagagggctcacgtggcatgccaaccaaattgccctttcattggcaatgctgaaagtgaaggccatgattctcaattcctggggatgcgttttgcattttgaaactcagatttcaggaggagctgctgcatttttctgttcaaacccccagtctgagagaagtgggctcaagaacgtaagctgttggactcttcctcaccctctgctcaaaaggcattcttaatgagcctcaattcagaaaatgaagtgtccaagtccaaggcctgaaaacctgatgcattatagtaggatgaatattttgtctaattatttgtattaatacaacagcagcctaggtacataggctttatatgaacttatctgtggctgaactccttgtctcccagatgaggagagcctagatagtggtcttttgtgagaaatggcttgttggagggagcgggtgtgagcagttagcagaacttctcatatttatttttttctgactttgagggagaattctgagaaacgatggaaatgggaaaggaagtgagtaggaaaagtaaagggaaatgtataaaaatgaaggagagaaagtaaataagaggaagtattagagataccaaccatggcatccagcgttttccatgttctgttaatcagaatctcagcttaaattagcataagcaaaaaggaaatttattagttcacatgtctgagaaactgaggagtggataagactccaggcctgactagagccacaggctcaaataacacagttgctgccatctctctcctgccacctcacagctctacttccctgctgctgacacccaggtaaacttcccctaagggaggcaacgtggctgtgaactccacaaggctttcatattctcttctcatcaacctcagtcaaaaaagagagatttcctctcaccagcagttccacaagatcccagactgggtcttccagtccctgattgggccacatacccaccaacctcagcagtctgtgagagatgacaccctggttggccagtcagtttctgtgcctgcctggagcctaggtggagttggctccacagaactcagagatggagggaggtgggaggagtttccctggggcacatcagggtacttgtacaggaggatgtgaatgcacactgggcaggaaaagacccgccaaaggaagatgcgatgaagcgaaaaggggtcctggagaagagctgttgatgtgatggttcaatgaagatggagaaacaaggaaaatcaaacctgtgcattgctttgggtggccagactggatgataaagccaacatggtagaaaggctcttgtatcaacaggagttggtcaagatgttttctagacagcattttaaattcagagcatcccttttattgtaggctttagaatgaaggaatgtggttgtttgggcctatggatcttaaccattgctagaacctattattttggagagctctgagagttagtgaggagagagtcatgagctggaataaacatgttttgagtacctactatttaacagacaccagtggtttaaagatcaataagatatggtttctgccttctggcggaggtatgggtaatataacaactacaatctcgtgaaactctcatattctctgatgaaaaggaaatattttcttcctccaggactaagttactcaggctgtgcttcctggaataccaggattgacttaggtgtttcgtgggaaaacaaaaacagaaacaacaatttgtgtcttgacagattaaaagatgttgtaccttctttccactgggggagggaggattggcatttgcaatgctcgttgtcatatgaatggctccaagaagtttggcaataatgaaagcttttagatgttgtttaacctggcattacaactagcttatgtgatgatggtgtacttctttcatgacactagtatagtattgaacatggttcataaaacagagcccacagaattagccacatcttcatggatttgcacatgcagagccatctggaaagacctgttacccagtctagtcttggatgttgtaagggacctattgagtgtttccccaggcctaggccacgcttctcaccacacccagcttcctgagaggtttataacgcagatcagataacaccagcttctcctgtcttttgcctctttgggttttctcctcaagaactagtcacagtaattctgttctttggagtctgggaagactgactgagattcactttactggtatcatcatctactggtggtacccaagatgattttggaggtgcatagctacatcattaattgtgtgaagaaatgctttttccctctcagttctcctttctgtccttttggccacaatgaggagaaagtcttagtttggagctgctgtgtctttaatgtttctattacgtgtggatttttttttttaagagagcagccctcaggctcaaagccttcagtaggtcactatgtctgaactacatttttaaattattttgttttcactgtacatatttctctgaatactttttacttatgactgtaggcaccttctgcttatgacagatgatcctggtctttatgatagttgtataaaattccctttaaaaataaatataaggaggagtgggtcaacttagatcaaggtttcttaatcttggcactaatgatattttgaaccagataattctttgttgtggagagttatcctgagcactgcaggttacttatcagtgtccctggcttctacccagcagaagctgcccccaccaaagttgtgacaacacagaacatttccagacataagtatccctatagcatgaatgccccaagtagtgtaaaccaccagtttaaagcagagtgatatagaagtgtagcaatagttgtgaaggtcgtgtggatgaccagatttgaatcctgtattatggttagtgggctggactgccactggctgccataagagctgggcaccttcaccccaccccatcaccctctccacttcgaagtctttccagatggctctgtgtgggcaaatcagtgaaaatctgtggtctctgtgggttgttggtaagagaatgagctttggaccctgttgcatttggggctgtccattcttttgcagaagcagcagaagtccagggagggagcactgggcagcccagccccatgacaaatgccaagtcaccagaaatcaaaagaggaatgctgagtcataatttccttcattcaggaattagcatgtgcttttgagattttgaactacagtgcaatgcagagctggtgaatgagcaaggtttaaatattcatttggcattagcatctgtgaggatggccagatactttcattaattggattcaggttatatgtgtttcgtttaaaagcagctgcgatcactaatggaatgacctctgtgtcactttccattctgaagcaggaggcacgatagctcctcttaggatgttgtgtttgccacttgcgctgacaccaaatgctggtaaaatatggttgctccccgctttaaaaacaaaattttgttttcatttttaataaagagacagatcccaggcttgaaaggcatgggacactgggcagctatactgatggctgcaaaggtgtgggatttgggagaagtcagttttctctttcctatccaccacccttcttcctccctccagcctccaccaccttgaaggccgtgagtccgaacaggggacccagagacaggtctgggtgtccaggtggttccccattctacattcagcatggggctcacctgccacccactcttgcctccatgtcccacccccaacatgcacacatgcctctctaggcttaattttgagcatttagaaaaacataagaccacccccacccccagctctcttttcatttctccctttcccaccaagattcacgcagaccggaacagagtctttcaatgacaatatactattatgttagtataataataatacatttgtttgctcttattcctagcagagcagccacggagtgctctgttaaaatgttagatgagaccctgttactcctctgctaagaaatctcctgaaggcccaagtgctcccaaggcccaggagaccttgccctccccttggcccctgacctctgccctcaagcctcctccctggccctggctccctccatgccagtgggtgcggcctgtccttgcagctcctcggacctattggatgtctttttccttgatgttccttctatttctatttcagtatctctttcttcctttgcatctttgcttaaaagatgtgtcctttgcacagtcttccctgttgagaatgaccccttctcccaccccagctacctctgcttcttgctttctctctacagcctcagagtcctccacgacactctgcagccctcatttcccatgcaggttgcatgccttccattgcgggaatccaactccacaagggctggggtcccatccgttgtagtcattggggtatccctggcatctgacacacagggatgctcaataaatgttggtgagtaaatgactgactgttactatgactgtattagtccatgctaattgcattgctataaagaaatgcctgagattgggtaatttataaagaggattaatggttctgcaggctgcacaggaagtgtactggcttctgcttctggggagacctcaggaagcttttactcatggccgaaggcaaagagggcgctggcacttcatgtggctggaggaggagggagagaagggggaggtgccacacatgtttaaacaaccagatctcacaagaattaattatcaaccacagctccaaaggggatggtgttaaaccatgagaaaccacccccatgatccagtcacctcccaccaggcccatctccaatgttggggatcacaatttgacacgagattttgtggggacacagatccaaactgtatcaatgactgatagtaacagcagcagagggtgtcatgggttacagagtgcctctgtgtgcattttcttgctttcctcaccacaaccccatgaggtaggctaggaaggttttattatcccactttgcagatgagaaaggtgaagcccaaagatagccaggggtctgttcaagttcaaacagctagcaacagtgaacttgaacttatttcttctgtcccctgggctgtttatctttgatatctgacatggctgattcaggcttctagaattctagggcagctgcaggtgaccccagtaggctgaagttaggagacctaggtaaacgagtgtcatggtgaaatcccccccgctcctgagaccccacaggctcctcccagacaggccggcctccttaggccttgggtataattagcctagaggtctccggccttgatacaataactggtaagaagctatccattctgccgttcattaagacaggtgacacaagatgaaatattttaggtaaatcatctggcctaatttagaaaggctctgtagggctagagcctttgatttatcggggagaggtatctgttatcagagcgtctcacacacggacttatttattatccagaatctgtttttaatttcagagattgtttacctaaactgctgcgtgtcagattccaggatggatttctgcttagcatttaattttagatacttgccatggtggacagaaaaaaatgggcctccagaatttgtagtttcattatgaatcttacccttggcagcccctaccagtagtttgtctttgaaatctccttggtacttgttaaccctgctctgctgtgaaagagatatggtttatttattggactttgcccatttatgaaaaagtacagaaattattaatggtttagtagctattaatgcattacttgggtggaattcaaattctaatatttatggtaaacccctttataatgaaacgggcagagaatcagctctcttgctccttaaatttggaaggctctggatgccattggaatggctccctgtgaaatatgagcccttctggcattatatttacacccataaataaaaaataagtactttgggttggaggagaaataattaagaatatttgtgtagataataaagaggaaatggtccagtttggttaagtgtgtgtttaggaaatgccaggggctgctgggactcgaatgagggatgggaaagatcagggctggaggactgtgggtgtggaggacttctggggacttgcaggaagggaagccttgtggaggccatcgtgggaccatagtaagatgtgtggatctgggaggcttgtttggattccaagtcttccctaagttagtacagctctttgatagcagttgaacttccctggacctcagcctcctcctccataaagtgaaggtgatatctcacaaaattgtcaagatggtaaacagtgtagacttagaattgtaataaataatctacagatctctgtatatgaggcctaaagagagaactcgggtatggcaagcatctcagagcaggattggaaaatacatatacatatgtatgtacatatacacacatatagagatacatgtatttttggtgtgtgtgcataattgctggctgtcgagtggaagatagggaatatagaatgggtatgaaatgaccttaatatggacattttaaaaaatacggtctcagaatacaataaaatgcattgagtacctcttacccaccagggctcttctgcccgtggaatctgttattgggttaatgttccctgatctttttctagtccaactgagcttctttctgacctcttcctgttagaagctaaagggtttggttgaatctctacatctgtaagcatctggtaatcagctgtaaaatcaacatgtcataacaggaaggaatctcaaggagcatcttgtttagggatggcaaatacattttattgcatatgaaagctatatagtggtggcttctagaagtgctgaattgagaaaaattctgacccatagccgtgtttagcaggaaagatgcgtgactgatgagtggtacctactagagttgatgagtgggaagtagtgatgttgtgtctcacatcctctcatagtttttgtttgtttgtttgttttaagaaggaaactaaaacctagcacagtcaactggccaagctcacagagttaaatctctggcttccaattcaagtgatactgaggccacaccacactggtgtggttactacagacctcctaggaggacagcagtcagctgcccctgacttaacagagtaccacttcaagtggacatagtgtttgacatctccttgacgtgtctgatggccttcacagagagccaagaagccaaggcccaagagactatttggatcgatgatgattgtgttaatgataacccatttatttagtatttctatgtccctggtcctataccatgcctttgatgcttgttttctcatttaattacaacaatcttatcagtgggtgacaatctcttcattatgcacatgaggaaaaaggggtccagataggttaaactctgcagagtcacaagctagcaagtctcaaagtctcacagactccagagcatgtgtttttaatcactggacatctcctttgtgcttgtgaatggtgccatccctagaggtagcatagatgcatcctccgagtaccatgaagaaagatgtacatgtaaagtagcaaaggaagctggggtcagtgggtggtcgatgctcctgacagacaacatttaggcgtcggggaagaatgtccttgccatctcatacagagtttccctatttctgtgtgtgctgccgtgactccagcaagagttggatggaattggggagatcaagtctccagttctttatttctgctccctgtagctaattgcataatgactcataaaagttaaatttctggtgagcatgtctgccatgctgttttgctaacgggcatggacgtttcctgacttcagaagaaaatgagccctgatgctggagaaagggacaacctttccccctaacaaattttgcctctcttgtccctaagttatgaggagcctgagtagacagtctcattctgggagctctgggctcctccccatggtgctccaggggctggtggctggcttgcattgagcctgtttactgtgtggtgaaggcagaagacctggtcattgtattcctaattttacctgagttaactatagccagataacacaggtcttggactcaggtccaaattcattcatccaccaggcttatcctttgtctgcctattggcttttaaatattcaggttacagggtataatcttaacatttaggttaactgtcaaataaaaataaaaataaaaataaaaatgaaaattaataaggtggaaaaaaagaagagagtgtctttatttacaacttttattggagctggtggaagggctccctctcagcccttgtgattcctgtctagaaaatgggctcttctctgcatggtgcagtcagcaaactactggtctcctcctgggctgggtgtgggttgctgccctgcctgggtcacatagaaggaagctcaggaaattctttgatccaaagctacttttctgtcctaggaaaggggtcccagaaggatttcacttctccccaagatagcaatgagaattgctctcattgctgctgatgatgatggaggaggaggaggaggatactatgttagcatttgagtagaatcatcataacctggcaggcattgttctaagtaattaacataattcttcaatagacttgaagttgctgttattgttatccccattttgcagttaaacaatagcttggcccgcttggtggctcacatctgtaatcccagcactttgggaggctgaggctggcagatcacttgaggtcagcagttcaagaccagcctggccaatgtggcaaaactccatctctactaaaaatacaaaacttagccaggcgtgatggtgggtgcctgtaatcccagctacttgagaggctgaggcaggagagtctcttgaacccaggaggcagaggttccagcaagctgagatcatgccactgcactccagcctgggtgacagagcgagacttcatctcaaaaaaaaaaaaagaaaccatgactcatttattccctcagggtcatattattggtacgtggtggagctggcctgagaatagagtctgtgcttggtgactggaagagtgtcttaggagaggaacacttccctttccctgtcagtctccagatgcttactctcctcttcttggagattgttttctttttgatcaaaattaaatccagaagagagagggaaaatcctgatggagcatctttgcaggccccttttatcagggcttttctctggcttcatctacctgcctgctccacaggccccaatccctcacctaaacccctaaggcctatctattctttgtctgtcatgaacagttctccaaatctttattcaccctaagttatagatgaatgacagaagatgaatgtgtttcttgtcccagcaatatttgtattttcattgtagtcgaagaagtgaagatggaatttcaggtgcaactgaccaggtgctgcttcccactctatggtctttatatatccaagctaacctgagatgcaaagctaggaattcacttaaactgtctgccattccatctgtttggacttgtctacaagccaatcaggaagacatatgaaaggtgaacagaggcagcattttagctccttctgcaccctaggattgtacagtgccacagtctccagtagcatgctctgaacatgatcactgtatcactcttccagatggaaggtgatcctgcaatcagtgggctttgcttagcacagtgtaggctacagtcagaaacctgactctgcgagaacattccttaggtgccgggagcaggagagggaggctggacactccatgttgcctgaggccaccaccctttggactaagagacagaaagaaaatcgcgctcacctctggaaagaccaagtcgttgatgtcctgcttcccctcttcagggctgttctacctataaggccatctcctgaagtcaccgtgttttttatataacattttgtccttttagaaattatcctgacgcatgtcaagagctttcacaccgaaaaaatatgtcacattagcttccaagtttctgattgtctaaataacgcagcaactcaacatacagctgtctggcattttgacagtacaataacccataattcttcctgccactcaacacttcaaggttagcattttgtagtttgctctcaaggagtagtcatttaaattttcaagagcaaagaaatgaatgtggctgcttcatacctctcttttgatctttctttatctgggtggtttttccatttatattttccattatatattttggaatgcttatatttgggtgtaaacttttcttggagagttagaatgttgtatcccattctccagatagatgggaataaaaatgagacatatctgctgagcttcagagggcagctgccctgtgagcagttcccaagcatttgcagtggagtaaagcaagaaggaactagtaggcgtatggagtagtttatgactctttcctgcctcctttcagaaggcaggtgaagtacttgcagctgcattctgaggaaggtggagtttccagtttctaccttctcttgagagaaccccacttgcttggtccaacctccatccttgagtctcaaggatgagtcttggaaacccaattaacatctttgacttagctgctggtttctgaattgtcctaactggcttggttgcaactggtcatctttgtaggcacattactacccctaggtgggaaactgggttataaatctggctttcattaattacctctgtaaacttgaccaagtcaacagttttcctctttgaacttctttccttatttctaaaatgaaattactagctcttgccatacctgccactctaggcttatatagctgggataagaagaaacaataaggataaatgtgccttgaattattgagagccatgctatctcaatattagacattattgtgaagtttttctttcaacccactgccagtttttatcccggatctaccttcctgcctgcagtaatttagtggcttattgtgatgtgtgggtcactttctgagacaaagagagtcaatataatgccttctgccatgaacaggctttatttagtggcctttcttggactgtgttcaagagtaaactcttggatcttaggcaccctgaggatatctcagggtttaaaattcctgagataaaataattaagttttagatccataactgactgacagactcaatgaatgtgctttgcctgggaaaagcctaacctctccaaactcaccaacccatgtttaagcccatgaagttaagcacaatttaaaagcctgaatgtgtgtgtaaaaagaatcactgtgtttataggcaatctgtttacactttgaaagccattagagtgatagtgataaaaatttaccagtttgggtcctaaaatctctaaaacataatttgtttgttgaggcctattggaattgatgaagaagagaattaactcttcttcggcatccctgggactcactctgacaagtctgagaggggctggaaattatagaagatttgaatctaggttcatggggagttttgaacgtgtggaatttctttggttcgttgcttttggtgaggaggaatccaggtcaattttcccctatttattaaaggttttatgacccctcttcttcagaattggcaatttcatttgctgtgcatttgctacttctaactggagagtttgaagtctggtgcaatctacttgtataagatgctggagtatcacagtcccatgctacaaatagcctgggctaggaggagaacaacttgatggggtttaccacaaatgtttcgatactagcaataacacagtcacttgaattgcatatcattctatactcttcaaagcatgttgcatctgttaacatagctgatctcagaatagtgccacgaagcaggaaggactatgatttctaaaattacgtgttttttttgtttgtttggtgtttttttttttttttgagacggagtctcggtctgtcgtccaggctggagtgcagtggcgtcatcttggctcactgcaagctccgcctcctgggttcacgccattctcctgcctcagcctcccgagtagctgagactacaggcgcccgccaccatgcccggctaattttttgtacttttagtagagacggggtttcaccgtgttagccaggatggtctcaatctcctgacctcatgatccacccgcctcgccctcccaaagtgctgggattacaggcatgagccaccgtgcctggccaaaattttgtttttaaggattttttcctgactatgaaaataatgcatattcattatagaaattttggaaaatactgagaatcataaagaaggaaattaaggttgcctgtaattccccacttcccagaaataaccacttaaaaccttctggaatatatccccccgacacacatactcctttctgtatgtatttgcacagatacctgtagattagatttttaaatttgagatccttctataaagatactatattgttctaggcctttcacttataaacatttacccatgttataaatagttcttgaaaccccactatttaatagctgaatagttttctgtttgaagagaggattataatattgttgagtaactaggttattttcagttgttccttattctactcggtatcatgaagtatgttccaggacatacatctattttttttttttttcattttaaacacagctctgattatatcctaaagacaaactcttagagatggaatggctaagatgtttctgtctagttttcgaggactattatgtaaagtgatagaaagtcagggattttatccaaatttgatggtgggaaaactgaagatcagagagttacacttacttgcctcagggtgcagagtggagcagccaggtggccccatggaggcactcaccttgctggcactcttaccacctgggaggtgaggacagcaccttggcaaagctaagctaggttacagtgtggccattgtgggctctcttcacagcccctatttgactgtggtttgtgatactgatggagattaacgaaattgtcattctgcttcacgtcactgcttctcagagctttctgggcttttcctctccccctctctccccaactcagtgctctctcagagtggctgcagcccatctgcctggcatgtttgcttgcctttctttttaacctaaaacattttggaggatgcctatcaagttccacaccctgtgttggctgcaaggggtacaaagatgcgttaattcagtcctgaccctcaaatgtcatctaggatgagaatgcgaacaggtaactgtggtgaagtatgaagaagacataatcctggggctgtggaagaatcagaagtgtcccgtttgtaaagcatatcatgctgttcctggtgcatgacaaacctctagtctgctgcctcagtggacccctttgtattcctattctatagtatttgttttgaccagacttatccccaaaagtcttctcacttttgctcctttttgctccttgtctgctttgacttacttcccattgtttttgtacgcagtgggcacctaataagtaatcgatggtgtggcctcatcacctggcctctgggtacctctatcctggccctattcttgctacttgtaagttcccaggaatttgcacctgtccctgagtctcattttccttatttgtaatattaagggaagaaaacccaaataactgctaatgaaaataatagcaagcatgtattgagccttattatgcaccatgtactgttgtaagaactttacacatattagcttattaaagcacacgtcttcgtggggttagggttactgttgtcccatttctcaggtgacgatccagggcccaaggccacatagccgggtggtgggaccatgaggcaggcagacattagagattactctcttgacattgtcctctactttcttaggacccttgccttacattgtacttggaatggcaaaacacttgtggtgtaatttgggagttcaatatggttagtttgggagagcagaagctctcttgagttaataatgtattgcagagcaggcatggggacgtctaggaccttggctgttccctccccaaagctatagaacatcacagaaccagggaactgtggggctgggagagacctctgaggaagagctcctttttcaaccatccattcacttgctcactcaccaacatcttgagcacatgctatttgaaagtcattatactacatgttgctcttgctatggagactaaaaacaggtatgacttctgctctcaggaaactcacaacccagaaagccgggaaatagcatgtcacacagctggtgggactgttgggagagaaagcagtaaggatgaaaatgttttcagttgaaatgcctaattctctctagacttccaggaaggggcctgacaattttggcacaaggactaccttctttccagtgcgtggctcatgtccctgggtctggcaagtccagaattagtagtagagaactcttgtccaaagcactaatttggaggctgagatttattgttgtcacagcacctggcttacaaaaataagctttgtcataatggaggaagaaaagggaggaaaataaagccaggttttagatcagttgcagaatttttttcccctgtctattgaagtttatagtaagtcaaaatgcctggtacccagattgatttgaatgaaaaaaatagatatacatatatatgcatgcttgaacaatgtcaggcttccaatgtgcctctagttcctctgtaagtccccaatctaggagtttcttctgtagcttgattccagcaagaacaggcgctgcttcagtattcatttcagtggcgttgacaatactgacaatataattgacctaaaaagttctggatttcctgttaatgcactttagaaatgtacatcaactaccaaaaaaaattcatttctatctacatttcacttgatttccattttcaagagagaggcttcatcattattattctatttgaatagcactgatatcttgaaggatggaaggagatttctattgtatgcgggagtactttatttcgatattttctttgtctgattatacatgataaacacacattagtgacatttcgtgcatgtttggaagataaatggggatatctctttaaaccattcctgacacttgctaacctgtgagcttaatggcattttctctttgattcaataatttgtctgtcaaaaaaaagctgggctgacattctccttgttgtgggattgaaatggaaagaaatctcttctcttgaagataattttttttttaaattgaggggaacattttaggataaaaatgtttttgaaattatttgggtttttggtgatggaggtggaggacgggggctgggaggatggcgctgatgaatgcgagagccctgacattatatgtgtggcaagtcatcttaaaagggggcccattacctccatctgcaagtcctcttgaaataattagggaacgtgtgaaatcttgcaaatgaagatggctcctactgcggtgtctcctgggagccatcagcctccctcccggtggaggtggtcgggtggggtgtgcatctgtgtgcacaggcatagctctgactccatgcacctgtcttagttcccctggatgatggagaagtcccctgaacaatggtgagagggaaggcagtcccagcctcatgctggagaggctccaaatccagatgcctgttttatctttggagattttggagcagcctcattcaggggctgtggtgaatgtgaatcgagtggtgaacctcgagtttaggaagacatatggtgggctgcaggtgaggcttattgctcatgagggaggcctgtgcatctgtgagaaaggtggcctcacatgttgggaatgagggaccatttcagagctgtatcatgtgaccccaggatgtgttgctagcctgtctcctggggcccctccgtgccctgcatttgagggtttcttggaagtctgattacgtaaagttgatgtgaataggcagggagcagaatggaagaggatgcttggtgttgagagtctgcttccctcccttcccgcttctccaccataaggggtcttcacatgcaccattagaaaacaaggacttattaggccccctcacgttgattcattcaacaccttgtatgtgtgccaggcacagttctaggccccggggaggcaccccaagtcatataacttgcccatagtgaagtcaggaataaaacccaggtttcttgattcctgatctgatgcttttctggcacaccaccctgccttcctggagaccccatctcctgcaggagcctgaaattctttcgcattgtctggttgttcttccttatggcttccggttcccctgtctgagaacgcaggtcagtcatttcatgctgggttaccctagcaaaacacaacaaacacaaacaaataaaaatgaagtcatcaaccatcacatgtgttttcccaggctggatttcccactagcaaatagggcccttcaaaacctttgaacatcctgagcactgttactttagaagccccatcacacagcgtatcaaagatattaaaattaacccccatctcatattaaacatgatttatgaagtttcaatgtgaaattttggggatggattttaaaaatcatttttatagttttgaagtttaagagtaaattcattatggcttaaactttgttatatttaactgtaaagcttgagttgatttgcacttaactgactgatgaatataatgtttctttctgttgaaatttaatgaaatatttatttaatttattattttcatttattatattattatttatttaatgaaacatttattaatcttagttttgcaatttttatttcacattttagagccatttattttcagatatcaaacatttcattggcctttaatgagtttagaggagagcccttgacgctatgcttgtagctcctcatggatgaaaggccctgaaaacagacctctttgcagctacccacccaaaaccaaattgtatactgcaacatttgctgcccttggagaaccccaaatgggcttgttggaaaacctcttctaaaatccctgggactggcctgagtgtcatggaagtgaccctgagggctcaagaagaactgccgtttctacttgccatggtgtcttactcagcttgggctgccataaaaaaatactgcagaccaggtggcttaaacacagacatttgtttctcacagttctggagtctggaagtccaagatcaagagccagctctgtttctggtgaagacttttcccagcttgcagatggctgcttttttgctgggtcctcacaccctcacatggtagagacagcacaccctgttcactcttcttctgagggcaccagtcccatgatgagggtctcacccatgtgacctcatctaaccccaattctctccaaatactgcaacttcaaatactacttatacaaaggttccacttcaaactactgtcacattgagggctagggattcaatatatgaatttgaggaggttgcggggtggggcacaaaccttcactccctaacatacagtgtggtggaaacacccaggcctcagagtctgtggctgtgggtttcacatcccaggcccaccacttttagcagtggttagcctccgaacttcagttcctacatctgtaaaatggggatggtaatcaatctgtagggttgctatttgcattagaagtaatgtttataaagggtccagcacccagtaggtacctcttctcattgtaatttacccagtcatgtgagggcatctttaatgaaatgaaacagcagctgttatgtgtggagttacaacaaagagacacacacacagagcagggagacaggccaggagcatgtctggaggcaagaaaacaggtaaggtccttggcattgaggcaaggaggggctcctacaaaaaaagtttttttcctacatttctgggaagtctcaggctttcagggaactcctcaggttgtgccagactgcaaagagtgggctgagaggcccagccttctgggcctggggatgattcaggaatgaaagatccccaagttgggaagactcagcttgagggtttttcaccagaaaacaatctgcagtttatttatttatttatttttgccatttccagaatggaaaacacaaacggaaatgatgagttttataaatataggagttttgtgcctgggatggaggtggggcgttggtatttatgtgcaaatagccctagattctgcagattaccagtatctggggaaggaacaaatgcccagcatttagaaagccatcagaacagggagcgccacccctggctgcgagaattggtgggcagtgatatggcaaccctctttcctgagtactccaccattagacgggattggtgggtggaaaatcagaggccatgagtagtctcccaaatccttccacttgagtcagcctgcagccaattaaccttcctgaccgactcaaggcaagcctagaccacagtggaaggaacgtcccctggcccaccctctctctctaccatcctctctcccttccttctgccactcaagtgagtgctcagtgtgtatcaggcactatcctaggtgcttgcattaaatccatgggcaaaatggaaaaatttataatagacattaaacaataaatatgtctcataaagacgttacacgttggagggcaaaaaatgctatggaaaaaagaaaaagagagcaggtaataaaattagtagtcccgggtggaagtggcaggacaggttgcagtattgaacagggtggtcaggagaggcagcattaggaaggtgagatgagtaaatggcaggtaagtcagttgagggtgttgaaggacaaaaagattataaaatgaactgtctctgagctcatagtgtctgatagggggaggaagaagccagtcaacattggaatgcctggaatatcatttcttcctaacaaatctgagcaatgtggcttagggagatgaagaatacctgtgcctgccagtccttaatcttatgtggctcatggtaccgctaggcagtgcttggtatcagatggagattgggacctgggtataaagccagagttctctagcccaggtggggtttttgggtttctaatggctcaaaacgtttgttggatgaatgacatgagtggttaaatgaaaaactgagtgaataaattcatcaatgagcaaatgaatgaacaatgaatgaataaagactgattaaaattcttatctgtattaagaatagataatttacaagttcacaccataagttactagttgcacatttagcttcagtagtaatttttaaggtgctttgctatatttaaaatatataggcatttacaccattgagtaaattttcaaatgtagtgaaaaattatccaattttaaatatgtttaggtattatggtatagtccgaacttagattttcacttatagctgtaatcaaagtagaccatattttctgaaccagcagatgactttgcctcctatgtagagtgagagcagactgcttgataagcttgtgaatcacagtttcttgcttatggataattgctgctcttagtcttgagacatgacatagagattgacgcagagtaaactgctggtctgctggttactaaactttgcatattttcagaaagacctggggaaacttacagaaagagcggcagacagtgtcaggcaggccacagactggccacccccaggtctactttatcagaagtttcaggtatggtctccaatgtctgcagtttaaaattgtttctcaggtgattttgttgtcgatagtgtaggggattaaggaaccactgcaccaaagccaactttgagagcaggaggtatgtccttttcttttaatttttttttttttttttttgagacggagtctcactctgtggcccaggctagagtgcagtggcgtgatcttggctcactgcaagctccgcctcccaggttcatgccattctcctgcttcagcctcccgagtagctgggactacaggcgcctgccaccacacctggttaattttttgtatttttagtagaggcagggtttcaccttgttagccaggatggtctcgatctcctgaccttgtgatccacccacctcggcctcccaaagtgctgggattacaggtgtgagccaccatgcctggccttaaaatttttactttattagtgtctatcaataaatggataagtgtaaatcctaattgcaggaagccaaatgagacagatttatccccctccaacaaggtagcatttcagtcttctttctttctctgtctctctttttcttattttgtttatcttctccctaaacataggacttctctgtatgtattactgtactatgtgctttctctttacaattctgatacattatgcatgtctttcaatacatattaaagctacatgatattccagaatgtggaagtgatccatcctttcaacttgttgaaattcattgatttactcaagtgcttccctcatagaaaaatgttgataaacctttgctgactgaataaatgaagagaacatagctatcttgtaccatccaccccacgtcagtttcccataggaagtttggggttaaaatcaagccagtttccttggcacatgtagttccagctacttgtgaggctgagacgggaggagcacttgagcccaggagtttgaggctgcagtgagctatgattgtgccactgcactccagcctgggtaacagagtcctatctctaaaaataaataagtaaatacctaaaaaaaataaataaatgggccaggcgcggtggctcacacctgaaatcccagcactttgggaggccaaggcaggcagattacgaggtcaggagatcgagatcaacttggctaacacagtgaaacccagtctctactaaaaatacaaaaaattagccgagcttggtggcgggcgcctgtagtcccagctacttgggagactgaggcaggagaatggcgtgaacccgggaggcggagcttgcagtgagccgagatggtgccactgcactccagcctgggtgcagtgcgagactccatcttaaataaataaataaataaataaataaataaatgaaccagctgagacttagttcttcttaggaaggttctaggctgtggtgagaacccctctaatgcaggggttcaggcaggcttgaaatggagtcgctgtttcacaaagggaaagagaacagatccgccaatgagaaaagttgatggggcagaggcctcaggcaaggtccagaccctgtcttcagagtctgtgaacatttaaggagctaagactttctttatcttcctggagtgtccacccactaatatagggcaggttatggtgaggactgtgaaagacccaagagccctggagctccctgtgcggcggctgagggtgttcagaggagtgagggtttgaactgagttcagaaggagagtcagcctgagctccgctgagcaaaggctctgggtgactctgccgcttacctggagagaaccgttttgcctctgtccggccatgtgaagaccggctggctagtgtagggggctcttggaaaccaggtgggtaagaaaccaagtaaactaactattctgttgtttctccaagaggagaaacagcagccacaaaaacctcagccctctgcagagcgaagctccaagagcccctttcacagacacataaatatttaataatcatctgtctacaaccaatctaggggaaaaaaatctttaaatagactgctcgaaaggccaaaacctgaattttaattgaggtactttgaattactcccattagtcagtcgctctgactttttcttagtgagggctggattgtttttgaaaggggaatcgaaattattagcagcccttaaaaaaagaaaaaacctgctgatcctactaaataataaactaggcttctttttaaaaagacgtggctttctaggcttcaagcaagaggggaaagtaagatgagccccacattttagagatgcaatttgaaaagcaagcgttaagggcattcagatgcctggctaagcagttcctcggcaaagcacttctgcaatgctccctggtcctgctaaagtttgcaggatggagaaggcgtgtgtgtgtgtgtgtgtgtgtgtgtgtgtgtgtgtgtgtgtgtgtgtgcgcgtgtgtgtttatatatttattttccgtctctctgccccctgggcctgcagtcttctgtagccgatgtaacaatcctcctggatgaacctcttgtatctcatgctagccaatttcgacagtctaaagtgctcaaattgagccattttgttctctgtaaaataaacctcaggccattatgcgtggtttttcattcacccgcctccttgtcacccttcccttggcccctctctgcccaccctcccctccttccccattctctcctcttgctccccctctgacgaatgggagggaagcagacatcctttaggagaccgctgttttcagtccaggcatgtcaacttcactctggcacaatttgctttgagatctgtggcatggagcagggctacagggtcaccccccaaccataattgatcttgcttattcatctgcttcctgcgtattgccctctccccatgctggcctttgtttggataaattgttggaagatttactgtggtgctgaaagccacctgccctggtgtccccaccacctcttccagggtgagacgatagagtggcacttagggaagaaagttctcccttctccccgccatcccaaacctagaggacatctcctggcatcacaattcaggcaatttccagactaatttactatggaatcacttttcacggcccttgtgcaccggtatgagaaatgttaattggtgtgtgagcctgagatgctcttccaaaggatttatcgtcagaatcagaggaggggaaggggagccgaggccgtctttgtgatggcttggaggctgcactcactcgcttcagattatttttaaaaccaatggtcatgatggatctgaatccagtaatttattcgattttgggtcattaacccttgttctgcttatggcagcaaatgacttcatcgtcagagatgatgagtgttccgaactgtggggatacttggctctctcgagctctcatctgaaaatcaattttaagcaagtggcaggcattagaaatcctctctgcttataggtttctgcagcattgcctctaggatttgaagaagcagggagggcgggggccggggagaagcctctggaaaactcccattgccggggtgtttgcgttggggtggctaatgtcctaagaaggctacacaatagactgtcaaaatggttctttcagagtggggcatggatcacagtttagaaatgggggaaaaggaaggaaaggagcaggcctccatggagtgatcctgcctgtagactgaataaaatagcttgaaatcattgttttgattcccattgactgaaggctggaggggctttactggttaagcttttaaagccgcagcagtttaaacacttttttttttgccttttttgcctgctgcaccctttctccagttgactttgaaacacattaactcatctttggaaaaacaaaaaacaaacactgtttgccttcaattccgaggctggcttctctcttgaggtgttatataaataggtggcatcatccagcatcactgtgcagggcacaggggactggcgtggccagtgccaacctgcctcccaccgggtacacactcccatggctgtccacactgcagtcctctgccatgctggacaaactggctggcagtgtttcggatcagagaatttcttccctgcctctgaagatggaagcaatgtttgatgggtgttggagagctctctgagaaagggcccatctttaagcactgcccatgtgagcctgtgttttccttaaacatagtcatgggagatcctttccactgctgactttttaagttgaaatatttagggagaaaatatgagttcttagaaacttttaagtggaagagatttagtaatgatttagccaatccccttatttttttgcagatgaagagcctatggcatagatatatcaagttccttgtccaaaatcacacatactgcagggagcagaagtgatcctgaacccaggtctcctgagcagtggagtacctggggtagggatggcagcaggttgctcaggtgcaggtaataagggactgcactgtctgcagggaatttacaaacaataacaaagcccctcactctgcttttaatgaccaccatgagctgattctcaacaatgtcagagctaaaaacacccctttctgccaaggtaggtgctcccactagccccctccccacctctttgggacccccactgcttctgactcccagttctgtgtttttctcactacactaagatgcatccctcatcaaatagcaaccaaacaaaaaaacaaccttatgttagaagttccctgcttcttttggaattaagtaaggaaaatagccttttgatgagctcacattagccaggaatggtgcagaaaagtgtgatgtcttaaaattcgaagctagggggcccctaaaaaagaagtgttgggatttgttggctctctccttgcctgcatccctctgacatgtgagtgtggattgcgggccaggagctcgcaaccttgctctaggtagattcgacagagccagggactctctgcgttaccttccaaacctaattctctcccatgtatcatcagagcctagggggaacctcccagtggtctgagggcctgaccagcttttatgtgtgtctctttgtggtcatctcggccagactggttgctatccaggtttttcttctcctccgcagccgctccctgaaatgggtgggtaaatatcccagtctgacttcagctgccgagtcatcagtcctgacagacggctgcctctttgccgagcaacccccctcactgcctcctcccccagcccctcatttcatcttccccctgtcagaactcaccctctggcagaaatcttttccgagagctaaatgtgagcctcaaagagatgccgtcaaggtatttttcataattttcaaaggtaatttccttccctctcccccacccgccttctctctgttataattatgtcttagcagctccccaaatcagcatagcagccaagttccctccccctgaaggtggccgccttttctcgcacaacagtcctgggaaaaggccttggagagcaaggctagggagccaaaggcttcctcaccattgcattgagaggcaagctggtggccttactgtcccgggatgaaggaagacttaaaatggctttgtgtcacttttggtctagagagtccactgtaccctgaggtatttccctaagtgccaggtccatgatggtgtttagggtactcttaatctaatttatatccttttttttttttttttgagacagtgtctcactctgtcgcccaggctggagtgcaatggttcaatctcaactcactgcaacctccgcctcccgagttcaagcaattctcctgcctcagcctcctgagtagctgggactacaggcgctcactaccatgcctggctaattttttgtatttttagtagagatggggtttcactgtgttaaccaggatggtctcgatctcctgacctcgtgatctgcccaccttggcctcccaaagtgctgggattacaggcgtgagccactgtgcccaggctatatccatatttttaagagtaggcaacatccattccaggacattctctgcagtttctttaccctcccactccccctctcatgcctccttactctctcaggaaggagccaaggaaagaattcctctttctccctgaatcctgacctctgtcacctctgaatcctgcctgtggctggccctcaacaggtggcctggccacaggaacgggaggaggactggcctgtctcaggccctctgcagagatgcaagcatggccagccctggctgaacggagatcctgagggtaaattatcttccactaggaatcctgagacttgacattcaaaaattctattcattgaaaacagactagccctgaaaacctggtttagtagataaaatctgtaaccacaagaggataaatcgagtttggcttgtttgtactggtctaacttaatatgatctcccttggagtttccagcatctagattttctagatcattaaatccattacttttcagtgttaacttttttttaggaggatggggtagagagtggatatattttttagtggcatcccacactaattgtgggagcgtcatcaaagctcattttgggtgtgaagtgactaatttctaagcccaggggttctgaaggaggattttcatccatttatcacaaaagaccccaacagccagtcaggaaaggggtctgctggctatagccactggtgtagtccacccagaagaatgaggagaggggccacttccaatcccctaaaaatactgaatgccaggatgaggggtgtgggaatgtggccatctcgtctcccgtacctctggatgctctacggggccatggagccattgctgtgagccagtgtgtgaccatgagcgagtgggccaccccctccatcctcagttcctccatgtgactagtggagcagatctcacctgcctctcagggtgagtgggcgaggcagacgagggctgcatgtgaggatcgtgtgcaagtcttaagtgctcatgaaagtagccatcaccatttccttaagattaacgcctccgagcctcagtcttcattgtttaggaaagggattctgtgtgattgagattttaacaccatgtgcccttcccctgtggagtggtggcatcttaaagagtgaatattttgttccagctctatcctccagggattggctttgggcaggtggggcaaaacatggggccaagttctttactctgaggggagatgcataggcacatccctgacttcccatgtctccagattgcatgggatggaaggaggagaccagaggtgagggcaagccatgctggatagtgtccttccctttgctcccttcccaaagtccaggataggaggaggaggagggagtgaggctggccgtagaactccagggcctatgtgagaagactgtcacactctagggttaggggcagggtctgagtgcagttcagggttgccaggttgtcagaatggcttggagaggagcagcagccttgcccaaagctggttcctggagcgcagttaagtaaagtcctgctgtcaacattgggcttctgtttaccggttgttcaagcccttggtctgcactgggttcctctcctcgatggaccactgtcttccaaccagagttttcagccactgcactttgtcatcagacatagctgcaggccacggtgcatctcagaagcccatgtcagggctatacttttgttccaggacagagctcacagcccagatacagcatgagagctttcatgtcccactcctatggtgaagagccaatgggaccctagtgcacttgttcatttcattgtgaatttgaatccatggctgtgtgtgtgtatcgggggttggggggtgctttcctccgagtcttttttaaactttaataagatggttctttaatttttggcattatcctttaaatacatagtccttttggctcttcccccgacccctgtaacccctccaaacaattataaagcataggaacaaagcgggctgggatgtaagttgtgcaactggtcagttcacaacgaggcagtgcgtgcatgcacacatatgcatgtatgtgcgtgtgacagacactgagttaaactcctcatcattaagtggtgtccttccttgggcaccagaagacactacacagtgtcttttcctgcataattggactgtcttttcatacaagctgaggcgcttctttcgggatataagcccatgcagtctcaacaggtcaggagcgatagtaaaaacctgttgtctggctttgtatttggaataatggagtcactaatctacttgatctggccaagtcagataaaggagaaagtgagggatgcctgtgcttcagagatggaatgtatttgtaaaagcgatttctttgcgggagggggagaagggggagacacataggaaaaaaagggagcaaagactgttggaaaccttttaattagtactaattacctcagcagaaaatgttggaagcttaaaggatttgtgtcagcaagtgaaagatcaaagattgctaggctcgcattttaatctgttggctataaaaaggagtgaggggggtggtaatgggacccaggagaatggctgcccaggtggcgctgtccttaatcccttctttactgctgcagccccaggcctagtcccaattacataataagatgatttaatttttttttttttttgctttgactttaactggatgtagaaaagaggaagggtcatttttctccccttcagtgaggatggggtggggcttctgatggtagacttggtagctgcacaatcccttgtttgatttccctaatcagcaaaatgacattttaatttcaaattaaaacaacaaccaccaacccacacacagaagagcgctctttaaggataaaagggtctgtgggtatacaaagaaagtgagggcctttggttggttgagctgtggttgggcatacctggggcaacaggtaaaatgtgttaatagaaagctccacttactgggttcatcaccatgacagttccttacaagtccagtagggcagggacagagggaggtgggggggaaggccgaggaagagtggagttgacaagccacaccacccatcttagaaggcctctgtgtttctctctgtcaccaccctattttctttcctttcagaatggattaggctggggcaagggctgttagcagaccccattggtgctctgcccatattcccttggcaatcaccattcttgtgcattgccaacctgatggcttccaactacagacacctgcaactctattctctggctgcttgaaccttctcagccctcaaccaatgactgatggcaggaggttggttaatatcccagctcccttgtccctaactgagatgtcactgagaagtgatccacattacatcccataccattctagagaagaagttggtggtcaactgctggtcagcccaatatggtctgctgtttctgtttaaaaaaaaaaagtatatatatatatatataattatatatatatatatataattatatatatatataattatatatatatggtaacattgttatgcctattcatttacatattgtctatgactgcttctacatggagctgagtcttaacagagatcatatgacccacaaatcctaatatatttactatctggctatttacataaaaagtttgctgatccctgaccttacggggttaaacccagctgcccttagcagtaacccacctcatactatatcctttattgacatctttccctttttaatctcactttctggtgttttgtgtgatcacttcccaaataaatgacttgctctcacatcctcacttcaagatctgtttctaggaactccagcttaacatcatatgcccatatacacaccaaaaggacagaatccctgcagatagtgctggttcatcccatttcttccagaagccaaggttgacaccatcagaaacataatgaaacaaaatagcagttcagcttggagaactcaaaaatgctttaacatactgcctctctgactgaaggatctgtgctcaagccattgaacctctttgttcaacaacttaggctccttctaaagcttaggctttaggagataggctgcaggaaaaatctagaaggaagcctgtatggtagaatggaggcccactggctctggatcagtgagcgtggctcagccctctggggtgtggcactttgtcttcatgggaggcgtgacctagagtggccaactattagaaggctagcctcctggctgcagcatctaaatatccactccctctaggaaaggctaccagagaaggtttcaggcccagacctcctgacgtttagcttatgtctcttcagaatcatatatgtaaatgtaaagcaactgccattcaaaatctgatgtacagtccctccttgtgtattgtcttcttgtatcttcagttagttaagtttgatacccatttatcatgaggccagagagggacttggttggaagattgaagaaatagatgccccggcactttgccaggtgtattagttatctattgctaagtatcaaattgccccccaatttagcagcatataacaacaaacattatttatcacacagcttctgtgggccaagagtttggatgcagctgaacccaaggtctctcacaagcctgtggttaaggcatggaacagggctgcagtcctgtcaaggcttcccagggaggatccctttccaagctcattcacgtgattgtgggtgggattcggttccacatgaaactaaggcctcactttcttgctggcagttggttggagacctacctcggctccttgccacatggacctctccataggacagctcatgacttggcaatgaacaagggagagagaaggagaggcccagaaagacagaagtcagtgtttttgtaatcttatcttagcagtgatatccatcacgtctgcaggattctgttcattagaagcaagtcgagaggtccagcccacactcaagtggaaggggttacagggctgtgactaccaggagggagggatcactgggagtcatcttagaagatgcctgacacaccatcagctatcaatctgaacatgccactatgctggtatcatttaataatgaggtacccacttagacagatttcattggctatctttaatcattaaatagtattagctactttagaataaaatctttctgaaacttctattaccaactcctctgttttcttaaagaggttacacaaaatgtacttttatgattttcaagtctcatctcagaatctacttctttgaaattgtcattcttggacttctagcctaaagtaatcactccctctgggttcttgtagcacttattttctatattgtttatgtggcatataatcatatattgctttgtgacagttctattgttatcttgagttactccttgaatcttgtattgtttaatttccacacgtcgacatcttgtctctccataagaattataaacaatttaagtgcagcagttgtctaatacttcagataaaagcaactgcaatggaggttttatttaaatatatgttgacttttttcctttgatgatgttgatttctgattcatgatggtgattcttttaaggctactaagaaaatagctttaaaagggtaaaatagtctaaaaaaggtatattactcattgcccttacattgggtggcccaaatactctgattttttttttttttagttttggtttatttattttggtaggtggttttgttttagtttttaatctgttttcctttagtgttaacataataaccattgcttttctcccttttctctattttggccaagaattgggactagattcttgaaatactgctttaaccgagttttctgactaaatgcttatgatcttctgtaacatcctgattttgtgacatcatcattgggactgagaggcagaggaaaaaggaacacacctttattgaacactgactttatgccaggcgttattcacttacctctaggttcatgactgtgtttcagagaatgaagatggattcaagtgtgaacttcagataaatagtgtgctgtacttttatagtctgaatgatggtcatcttacactaggaatcagaggccaggtcttaggaaaagagaataaaaataaatgggtttaaggaggttggatttgaccgccgcatcagtgctcagggtcctcagttcgtaatacctggctcacacagctgcttgggatgttgcctccttgtgaaaccacttccttaggcctggatgagaaccttggcatttcttataagaatagtagtaacttagaagttgtatatgggctgaattgtgatcttcttccaaattcatactttgaaaccctaacccccagtacctcagaaggtgaccttacatggaaataggattgttgtagatatcatcagttaagaagcgctcatactggagcagggtaggcccctatttcaatacgactggtgtccttgtaaaaagaatgccatgtgaagagatgcacacatgtgtggggcggacgccgcatgaaggccggagttaggctggagcagatcccgcgcgaaggccagagttaggctgggccagaagccacacgaaggctggagttaggctggggcagacgccatgtgaaggctggaggtaggctgcatgccaccagaagctaggagagaggtctggaacagaccctcccctagtgccttcagagggagcgtggccctactgataccttgatttcagctttgtccactctaggaatgtgagacaaatttatcttgttttaagccacccagttggtggtactttgcaacaatagcccaaggaaactaatttcacaggagatgtttctggcctggatttgagtctgctacacctcatgttctgtccttggtcctgaatcagtccccttgttttctgtccgaggtctcccattaccttcaggagtctccattctctaaaaggtgtctgtgtgggaaggtatcttcctgtggtagttccagcccagttgctacttcccatggagaaagtagcccatcaacggtgatgaaaatgacttcctacactcaggcagctgtgttggggcagatctgaaatctctgagggacagcccatttggcatggggtattttcctgggctgctgtggcttccagggcagatgtgcaaacacatctgtgaaagttcagggcccctgagagctaatgagagctgaagcttcaacctgcttgatatgtttgctgtcactttcttttctagtgacgttggagaagggaaaagtcatgcagtctgtcaatcttgtcttctcccatgaaattgagaaagttctattactttcctcgtgaagactgacatctgtgccatctcttccaccactgtgggggctccttcctagatcacgatttgggccaataggatttagctgtaacccttggcagctgtggaagacagcttgccagaacagttgtcagaactcaaaggaagcagagcagtttgcccgacaatagacagagcaaaagtcttatcctcgatctaatccagggtttcttaaccttgacaccagtgacactttgggacagataatgtttgtagtcagggcctgtcctgcatattgtatgatgtttatcatcatccctggcctctgttcactaaatgctaacagcaccacccagtcatgacaatcaaaaatgtcttcagatgttgccagaagtcccttggggaacaacatagcccccacttgagaaccactgatctaatcccttcaaatcaccgtagggatctctgggggattttgcagtggtctcgggaaaatgcacagacatgtcgtattaggaaggggtagttttgggtaattgcaaggtagttgaggacatttaagggaattgtacaaggcataaagatgtcaggcttctgaagtttttttttttttttttttgagatggagtctcactctgtcaccaggctggagtgcagtggtttaatcttggctcactgcaacccctgcctcccgggttcaagtgattctcctgcctcagcctcccgagttcctgagactacaggtgtgcgccaccatgtgcagctgatttttgtatttttagtagagacagggtttcgccatgttggccaggatggtcttgatctctttacctcgtgatccacctgtcttggcctcgcaaattgctgggattataggcgtgagtgagccaccgtgcctggccctggagactcttaagacataaagtgaaaagaagcttcaatcaatgcataatcttacagattttaaatgttcagattgttcagctattgtgattatgttaccaaggggttactgtttgctggcaaataggtagggtaactttcatcacagtttgcccaggacagttttagtttacgccattttcctggcataatcagtagtagtgtcccctttattctaggaagtatcccaatttagacagcaaattttatggtcatcttaccctcgggccgggtgcagctcactgtggtgtttgtggacagcacaaatgctaatatggctgtcactcagtagagtgtgtgctctctgattccttcagtcctcgccactccttattgtcatatgtgcatttgttgtattgcagcatttctaagatgtacatttcttttacatgttagcatacctgaatccatctcaaaattgatggattcttgaaattgtcactgaccaggaggcagctgtgatggagttgctgttattagtgcacacttgaattggtcatggtggttcttattatctttgctgcagttgacttatacagatttttggtacttcacatgtcatttatgaactcatcatgatttggcattgaaagacaaaactattgtgttaacaaaaagaacataaacttgacattataaagcaaatctttattattgaaataatgaccttggttcatattttctggcaaagtaacaagcagaatatgaaaaaggaatgttcctgaggcattttaaggtaggaaaaccttgggtcattctttattgacagtgttgttgttttttgttttctagtacataaaataatgttgtgtctataattggtgcagcttggattcattgaaatgcaatgtgtcacctgactggaccctgaagatgtgtttgagttgagggccccagtggttcttttactgcagtagatatagatttgagttggggaattagatcatggatatccacacacaaagagcctgatatctaagtcagggctgggcctgggcttctgaatttttgataagtctcaggagattctggtgcaggtggtccacgagccactcttttacacagtctgatgtggtcactccccttgattccactccagaggaatctgagcccagataagggagggctctgttcatgtagtgagttcagcccactgacccctgagtagtgttttcctggatgctgcatcaaacacaaggtgagctgaggaagggctgcttggcagctttgcctgaggtggggtctgacccagactggaccagatgtgggtcgcctaccctgcttctctcagctgtctgtactataagcgtgtggatacttggtacatggatatgcacatgtggcttttatttggtttccctatgcatgttcaggaaaacatgtcacataaaagcaggtaaaggtattttggaagaaagagagtggggatctatggaaaatgatagggagggaagagcagaaaacaaaaaagaacatttctaagtctggcagaggacgaagacaggcctggaactggaagcacctgcacttacatttcttgagtgctttctggtttgccaagcactttcccaagcttccatttgaacctccagattggaaatggggggctgcctgatgttctttttattccttcaaccccagtgcaggcccctcactctaaggtgaggacatctgggcatccacagccactgactcctgtccaagctgcctgctcagggggccctgggtatggggcctggaaagggcctgtgagaagagtctcctccaggttcccctggcagctcccaatcccctcaccatggcaacctccaagatggtgctgaagaccccagcgagagcccccactgctgttcagaaaacctgaaaagaatagaatatagactatggtggacatttgcactaaatatgcttacttagcaattctgcgcctgaggaatgtcaaccttgtgtttttccatgccttcctatgagtgtctttcacttttcatcactcttccttcaattttccctcagttagtgttctctttagaagtgatgtttttcaagctgccttcagataaatttctggctctcttcttggacttttcttctggaaaggaggcaggattgggatttgggcctgctagtaggatgcaaagagatataacctattgtgcccatggtcacagagcttaattaattgtcaaggagacaagagtaagatacctgggacagttggacaatagaccaaattcatggaccagtggtagagaaagtgttcaaatagaagtcctttgggtattcagtctaggcatggttagctgggtttgggacagacagagaagtctccaaggaaatgggctctaccttgacccgtagttgtgatgcacgtcaatagtgagcaggtgggggcatttcaagtgaagataaaatgaccagacacactactcaatctttctgcagatcttggcagatccttagaaggtgataggaataaaacctagaggtctggcttgaaagcttgggtcaagactgatcaaaaagttagctttgtcaaaagcatcaggctcattcttacctacagacaacccatggtgatcctaagtcattaatccacccagaggcctgtcctaacctgagtttccttgctttgaagtgtgctgtcctctgcaacatgaggaaataatttgctgcctgcttcagtgaaccatcaggagagccagcagacctaatgacatgtgagaatattaacctcctaccatgaagagctgtgaatcttgagcggcagtctataattcaccctggactcttaagccaggcctctccagctttttctctcactcactttctcacttacacccagagagagaaggagagacctgctcataaaactttatattctccaatagtgtgagccttgctgagctgtttagtaatgagtgactttccttttgcagtcatggaaaaatgtatacctacagaggcaggagcagggggaagatattttttcaatgttgcgctttgcatacgctttttcctatgcagaaaggaaaagtgtcctcctgacactggaaaaaatgcatgatattatggaaggtgaccatttcagtgcttgaataaccaaacttctttgtaattctgtactttatgttaaaagtcaaagaaaagtggaggtgaggatactaatcttaagatatttggatattagaagagatcttagagaccttttaaggtcacttggaagcagaagaagcactgaaatctcattaacagtggtcgtctgtttatgcccttgtttcacgagatttggggcttttggaggacaggattgtactcctagtgcctggcagagtgtctaatccataggaggcctcaaattaaagttagtcaaaagatggagccagtcacctgctctaaccccacattttgcatacggaagaaacaaaggtccaccagtgattgactcatgggcacagctagagtttttcttaggcctcaacggcagctcttttcttccatctgcctgtctaattgctgctcttggccttatgatgttttcacaagcaacgtgttattctaatggagactatcttgatcttgtcaattgagtgaaggcaaacacaaatgtagggccaaggcaccatatcagggagtaaatacagaagtgggcaattagcctcagggcccagagtgcaaggatgtgcagatctggctgcctggcagagagcacctagcatggtaggagtccttagaccagaataatcttccttactttgctaggaaagccttccccaccaggcctcactgctccaccagctccatgtgggctgggaggaaacctattttattcatcctaggcctggctaggggatgctcaataaatatttgctgtagggggaataaataaatgaatgaaggatccagtctgtgattgttagggtacctttctattcaaccaggctgtttaatttccgtatctcaagcatctctgtctggacaatggacaatgctgggcacctataaactttttgatgacttatagaggtaataaaatcaaactttcttcttctgcttacttgactagtgcgatgaattaaccaatggttaatgtctactctcggtatatgtaattctcagcctttctgatctcttcaaattactgtcttcttccttctgccatcttctttttttttttttaagaattaattttattaaaaccagtcaaattaaagctgcctctgtccagggcatctcaagatccatccattatggcttcttatcttggcaggcgatcggcttggaaaggcagctcagccattatgcacatacaaagcccatcacttcacaaccaatggtcaattcatcaaacatttatcttttgccctctgagcgtgtgacgctttgcctctcatttcctagtttgggttgctctgaaagatgaagaaaagcaggcgggagttcttttctcccctaactttccccttcccccagatcgtttttattaatcagatttcatacttgaggcttgaaacatgccctgctctctttttttggccatctgagggttagggatagtctgccagtctcatgctgaactttttactgaatggtggaacaattaaggcaatgataaaactttgcgagttttcatcttgcaacccactttggtgcatgggatgtttaaaaatgaagagacctccaaaataatctagcctagccgccttagtttacaaaacagtacagtgaggcccacaggaggcaagggtttgactgaaatactgcagcaaggtgctaaccaaggcaggacctggatcaggttccttggttgttcctaagacagaggctctcccgagctgtcatctccccatgcattcaaatgattctgaaacatatcactatttcttctggaggtttagccactgacctgcttcattttctgaggcaactaatttcttcctttgaaaagaaaatatgcacatttatttttcaaaaacaatctttcagctaaacaacaattggtctaggtttgtcttcatgtactgtatctcagctgatccccattctgatatctgcaaattggacaggtcagggattttctgccaccttgaaagattagaaagctacattttccaagtgttatttttccaaagtcttagctcacaaaaccaggacttgaaaacagagctcatgactcaatggagtggtcttatgctgtgtgtttaccaactagatttgcgtttggcctcattgagttgacaagatattcctcatcagaacaacacattccctatgaaaacaccacactggcttcctgctgccatgagcagcagtcagataaccagagaggcagacacagaggaaatagccttggttcagtgctgggaaaaactctttttctctatgctgcacaactggaaacagttgatctcgtctctgtccctaacattgttaggtgctagtacacagggcccaggacatgccatgagaggatctggaaagcaaagctcaccaaattattctttgagaggttttgtgaaccatagagctagagctattctggaagaaagaaaatggctccggtagcaagccacttttggaggtcaccatatctcctggggccttctttcctgctggagacataaagctatcttgtagtctgggacagaaaacgtgttttcacctttttcagccaattaagacctcacagaatcaacagttggcacgtttttactggctttcctggcctgagtccattccaggggggccctgcccgtggggagctggtctttgggcaagtatttgattaggggcccttggggtccctggggctttgagatccagccgtgtaaatgtctccttttctggttggcttgcaatgagtagacaccatctgttgaattaaaaattccctttatggagggtggtgaaaggcttgtgtagaagagacactgttatctttcaagcaaacagttcatgaggttgaagagcagcgttcttggcccaacatatgtttgcccaatggctgtgggcgcctcccccaccaggctctgcattccgccccatggcgaggtgcacgcataccatggctgcggtacaccgtgtccactctcacatctccctagcaaagaaaacccccatttatagaacccgccaaacaaactcactctttagactcttaaaaacaaacaagatcccgaggccacaggctccatgcgtgcatgtgtggttttgtaaaatctcaagccgtgaatcaaaataatttcagagacatagtcaaagcccaggccaaaccctgtcaccagggtgggaaaaagacaggaaagattcgctttgaggagggaggatagcccagagaaggagaatgatgggagcaaaacatggaggctgtccttcatctagtatgttcctggagagacacctgctccttgtctctgtccttagggacttgctataataccttcaggacaagcataggagggatgggccaaaaacagaaagggcttactacagccctcattgctttcctctcaacttccagagctcatcttatccatgctgcttactgatacgctgtcctgtatggtgtccccttattccaagcccagcgtctctgtctccttcatagatggtaagagcattgagagcagattccatgacttgtgcatcatttgtatccccagatgcatgtgctcactgaattcctgtcatgttggaaatggataccacaccacatgctttttggtagcaaatcagctttctggactgtagcttacttgagtgccaggatcaagttatctcttttccttatgttccctcaccaccaaatgtggaataaggtatcagcagatgctcaaaagattagaattcatttgcattgagacttagctcaagcccatctccttcaccagccccagccccttctcagagtagcactaatcatcccaatctattaccctgcattatctggtaactgcttccctgtctatacctactacttaatagtaggggactattgcacagtcatccttgtagctccagagactagcaaagtactaagcacagagttggcactcaatacatttttataaatgaatgaatgaacaagctatagaggtgtaccccaaggggatcattagcagataaatctcaagccagtcccacctaatgcatacttaacttcaaaggaaaaaaaaaatctaagaactagctctttgggagattcttctaggagcatccatggagtacagagtgaaaggaaaaagaactcgaaaaccatttaggttcatcattatattaataattgaggacgtacaatgaatgggttacaaagctacacacagtgtttggataaaggatgtggcgatggtgaatttccatttctggaccacagctagaaagtatgtagaggtagtttaacatagttggggagcactgcactttatgtacacaggttctaaatgtggcctggtgactcatgtgtgttttcaggtaggccactttacctctctggacattagtcatcttctgtgaagtagggggagagtggaacagcctaaaattcctctaggattcaaagtctatgagtctataagaagactataatagggcatattttacacaaatagagctgtagctctaatatgtagtttactttctataagaggtcagggtgcaaacatgtgcctttttattatgggcacatgttacacccttcccatagttaggaaaatattaaagaagccttgcacagtcccagctagaagaatgaggcatagagtttagtgtgctggaactctgctaccctcttcctaccagactgactcttaagggaccctttggcaaagcagaactgacttaacagcccttataaactatagttataaaggaaggagctccagtcagataaccatagtatctggatagaatattagaagccatcgaatctgatctctatgaagaaattccctctaaacattctccatgattttagcctctgttcaaataagtatagtggctctgagggcagctcatcctttagtgaacagcttctccattttgacaagtttcaaaaaattgattcaagacatttcctcccagcttacataattttctatttgtttttgattctgcattctggaaccctgtaggctgaggactttgaaatgactaagacttctctgctcctggttaagcaactttaggactgtctcaatcactgtttcttacacccttcacctcctggtggttgtccttggatggtgtttctgaatgcaaatccacctttgaatctggcacctggaattcaaacaaagctccaggcacaggcacttaggggccaggagagtagtagagtggattgggatcagatttgcttctgtggtggtcactggcgattcatactaagtcctcttcccagacactgctctttttctaaagcttctacatgttatgtatgtggaattgtcttgttttatttaaaaggaatattaactgtggtttttcctgattataaaatgtatattcatgatagaaaatttagtagctagagaaaactatttgaaaatgactgataaactccttacctgggggttaacggtatgtatctgggagatatagataggtatcacacacatacacacacacacataaatatatacatttaagtgtgtttgtgtatgtgtgtacagaattgttataatgtctctgtgtacaagattgtatattaacagcagtttataaactagaacaactaagaaagatgactttgatgattcttaaccattaacatggaagaaaatgcccagaaaagcttggtgcagattaaaatttgtgtggaaaatggtgaggaccatatggatgacttttaattttcatgcatgagatctttgtgtgtgtactatattacattgtgacttaatttggggtacttaaatgtatagcatgaaaattgtactggctcattagatagctgcctacaatattatttttaattcctgtgtaatattttatgatacagatatattgagctttatttaatcattcttcaatccttgggcatttaggcttgtttgcaatgttattgtaaatgctatagtgaacatacttgtacataaacttatacacatctttgatatttactgaataaattattggaattggaattagtggatgcaaaggtaattatttttaagtcttttaatataaattgccatccagcaatttcactgtctcattagtcttgtgtttgtttgaagtaaaagcttgacaaaactatgttaaaatctaagaaaaggatataaatatttttattagaatattctagattcctaataaagctgaaaatttctcccatatttttattattgacaaatttccttgtgaattttccatccaaggtttttggtcatttttctgttagggcttcaggttttccttaatgatttataaaagctctttccatgttaagggtgttaaatcttagactgttagaagggttgcaaatatattcccaattttcatattccttttaattttttcgagtaaatatttttggatagttgaactttattatttagtttacattagacactgtgaaatttcatcttattgagctgaaaaatggttgattctaacaggatcattttggatcctactgtatctttcttaatatctctttagggtcctgtcccctataaatgtgataaacatctccttaaccaagccactggcaaaaaacaaaaacaacaaaaaacaaaaaaataagatcaaaatccctagaatctacccatagagcaatttgagccattaatcagtattcttcaggtacatttttgaagcagttatgactctacttctacctaagattgtcattttctagcctactttttggcttcctgtcacaaagatattatgagaagcttattcaaagccttttttttttttttttttgagccgagtctcactctgtcgccaggctgaagtacagtggcatgatctcagctcactgcaacctccacctcccaggttcaagcgattctcctgcctcagcctcccgagtagctgggactacaggcacgtgccaccacgcccagctaatttttgtatttttagtagagacgaggtttcaccatgttggccaggatggtcttgatctcttgacctcatgatccaccctccttggcctcccaaagtgctgggattacaggcatgagccatcatgcctggccaaccattttgaactctgaatacaatatatatcttctttattcctacatgagtatctccattaacaactggtctctcaaaacttttccttaatgcacagaatctgcctgtttgagaatctgtattacattttattgatatatatcctacctcattctatgaaaggtttgggctagcttattagaatgaataaaattaaaaagcagtatataaataaatgaaataccaaggctatgaaaaaattataagccttgacaatgaagttagaaagcaggtatggatatcatgaaggattacctttttacaattgggtcacaatttacctctgagcttcctggtagcaaaagtaaaaaagataacatgatcagatacattattcacgttgtcctacagcaagaaaatacaggttcctgagagctatcatctgaccagaatttcatatgggtaattatataacctcatgtatccaaaataggagaatctaccttcttacctcctttttcaagtaacattaactccaagggcttctagctccttattctccattactaattctttaggcatcatatttgaaagttttcttagtattcttagatatggtgcagggggcttcagacctagttaactattaatactttagctttttggctggtcttggattcaggtctctcagatgagtgttgaattttactgtctgcagttcagggattagccatcatgttggggtctcaatagagctttggggttgactttgaccccaaagtcatgtaaccactacttcttttttgttgttattgtttagcaatgaggtctcgctctgttgcccaggctggagtgcagtgacatgactgtagctcactgtagcctggccctcctgggctcaagcgattctcttgcctcagcctcctgaatagctgggactacaggctcacaccatcatgccaggctactttttgtgttttagaaatggcgtcttactatgtcgcccaggctagatgcagttccttgtgatgtcagtgtacactctgtctcacataccctagccagaacctttttcatgttcttctatttcttaaagacatttctattcatcttgatacacttacagtatggattagttgatttatataattatttgtgtgtgtgtgtgtgtatatatatgtatggctatgtgacttgaatggcagaaaaatacacacagccaactctacatactgtatatagtaatatacaacatgtataatatgtatagtaatatataacatgtataatatatgtcgtaatatatagagttacgtatctatgtctgtctttatccatacatttaaggatataaaaaagagttttatggaaaaaagaatatctcttacaggactaggtaaacaaattataaaaatgtataggtataaaaatgtcacccataatcccagcactttgggaggctgaggggggcggattatgaggtcaagagattgagaccatcctggccaacatggtgaaaccctgtctctactaaaaatacaaaaattagctgggcgtggtggcggaagcctgtagtcccagctactcaggaggcggaggcaggagaatcacttgaacctgggaggcggaggttgcagtgagctgcgattgtgccactgcactccagcctgatgacagagtgagactccatcttaaaaaaattaaaaatgactgtgctgccactggaccatttagtgggagatgagtggtcacatcatacctcaccaattctctcttttctcccttcattttccaccaggtggcttttggtcacctgtcctgtccttgtggcttttgccatgcctttgtgggaagttgatatacagacatttcccaaggagctgccgtgtgccaggcactgcagttggagtggtggggggagtataggagaggaacaagttactatttctgctctcaaggtaatgttgaaacaatttaacaactgcactgtccaattagaattgatgctggctggagcagggtctatggtagccctgggctgtagtgggcattggcctcctagtttctggattatgaagaggtctgggggtgccaaggaatggccagggtagcaggaagggcactcagagctgcaattatttacctactgaaggaagtatttaaatattttaataatgagaactggtatacccatgcagacttgctgaatgttactctttcctgatcttagccacatggccccagggaaaccatgaggaggcattctggcctctgaaagaatacgagtctagaggctgccctccttgccactggccagtgtgctggtcctgctgtctgtcccatgcttggatttattggccgtttttttcttagacactcccaggttttggctgaacagtgctcagtggatgaggcagtaccgagccctcactgtacacttaacagctttctaggagtatggaggctgcatggagatcccctcttagaggggcctgggcagacagaaatcatcagagagatccatacagaacaggcagcagccagcccttgcaggtctgggggcctagccagggtagtagacatcagacccaggttaggccctttagaacttccatggccacaccattttctcaattaaaaatatgggcagggatatttagagtcgaggaagtaggtaaagatctttgtggagatcttgctttcttgattggtttgagaacatcccagcctttgctcctggatttggggccaaatatagtcccaaagagacagatgcttttgttttagggtctgtggtcagctattccccatgttcgctgcccatctcatgttggtgcagctctgtcacccctggtataggctggagctgagggaggagagatcgaattcttagcacagcctagatccaaggattgatccaggggttctggaagtatcctctggtggtttttatggtacaatgttctggctggtttttggctgggcaaggggcagggaggaatggctacaaattagaggctcctgcccaaggctgccagccctacctgggcccgggccctggctcttcccctccattctggtgagtggctcatttgcagggaaaggatgaaggtcactgatttgtgcccacccaggagcagaagggactgggcctcaaggggcggcccttctgtggggcccctggccccctacccatggcccccccatgccagccactggcctggcctgggcagggctgcacgcctgttcggcgctgctgttttcataagctaatgagggcagagtgtgagccacaggcgatgatgttgggatattaactctgacaggaagcttgatcataattatcttaacgaggatagggttaattacagtggaaacttaaaagttctctccgtttgaatccactggagcccaatgcgttgtgatgttttgtcattttgatgtgactttggaaaaggcactgggatgctcccagcagccgctgcagctcctgggggagcccaggcagagccctgggaacgagggaaggaggtaagaggatggtacctgtgtgtgagatcctggctgcgttgctgctggtggagggggaggcaggcagcctgcagggagttccaggggtgctgattaggtttccagaacaatccaggcctggatgatctccctccagctggctgtgcctaggtcctgggtgaaccttgctctctcctatcagcccccagcccatacctcagacatcgcactactccaggaagctggtgagtgatgctggactgacagttggcgtctccaccggggatctggttttggggtgcattttgctgtccatacacaaggtgatagcagacaaattgtcattttatttaacagcacatatttgcaggcacctggcatataggggaatgaactcaaagatctacacacatattttttctcctattcctccctagaaaacagcagtaaaaataacagtaaaaaaaaaataaataaagggtaaagccacctcattctaggtgtatgtgtattgtcgtccacgtgtcagctgggacccccaaaacctatcttccccagtactcccatttactatgctctctgccccctgacttctgtgccccagccctcagctctggatctagatgattaaatccccaggagcacaccacactgataacatgaaaacaaggatttattcattagcaatcacccatgtaatatggttctctttttactgagcagctaataacgtcacatagcaaaaagagtctcaaaaccagacaggtgacaggggatttgagactgatcttaccagctcttctgggaagtctcactctggcgtggatttctgccccatagcccaccctgaggggaagaaaggctggctggatggaggtgggcgcttccttggtgctcctgggctctccccatcttcatgctgtgtcgttttgctttatgcctccctggagcactcttggaaaggagctttcttctgcttgccagttgccaaccatttgctgattctcatcagaagaatctaatatttgcataacgtaactcaggaacaatgtgtatttggatgctgcctttgagcggagtccaactgatgtttgtgcacaaaggaattattaaccacccgtaaggctccctaaggggaagtggcctcacctcccctagtggtaaacgggcccagtcctgagaagccttttggcacatcactccctaacccctagtggaggaagggacttcagaagagcccgaaagtcccctgcacaagcctgacttgctgcacgcctcctctgtgggtttgttcatgggcccgtcccctgcattccaaacacacccccagggtcagggcgtctggaaacaaaacagtgaataaaaggaggaaggaaaagaaaaaaaaaacagcgtatgctagtaaccagttagccgtccttcacttattctcgacaagatcctatgagctggaaggaacacagaacaggagagttcagatgggctattgacaggcccaaattcacacaacaggaaatagaggagcggaggcaaagtcccaaaccttcctgcctagatgtgcgtacattgtgggtttttaaattttttttttgtttgtattttttgtgggtacataagaggtgtagatatttatgggtcacatgacatattttgatacaggcaggcaatgtgtaatcatcacatcaggataaatgggatatccagcccttcaagcatttatcctcacaagttgtgttttgcctctcggaaccaagaggaaaaagagaaaggaggaggaaatgaaacacgatgacctctggacccctactccaaaatgtgtcccccctcggtggggctggcagtgttggttggaggagcaggcgtgctctgggagtcgagtcctgagtgggaccaccccgaggtctggcaggaatggaacatgccggcagagctctgggcccagtggtatctacagatttaattacttacaacacatttttatacctcgtaagtattgactccctattttggagtcctcttggcagcgatcccacaagggagctatggatgccttgggaaagatctggtgctgaagttcacactcacagcagatgtgcagacattgcacacgcaagcacacggggctgtaatggaagcactatcagtaaatgaataaatagtgtggacgacatctccctgatttgtcacattttatagaatagcccggcatcccctacgtgtctccctcccgtccacatcgtagctcagctgtcagccggtgcaggctcagcacatctcctgggtctggcaggtgaacgagctgggagtctgtgtctctgtgtaagcccctctgccggccggcttgctttaattaatgtctgtgtgcgcccaggcaagcacttgtgcacaactacctcgtgtcacctccacccccaacactcatgagagcccataaaattaagagttaactttcagcgatgtgtataagcaaggctatttttccctttctgctgtttttttttttttttcctggagccgggtacttaattctttctgttgcctttttatttactgcctcaacatctacagggttgcactctacacttctttcaaaaattaagtgagaaatccactttccataaattaaaacagtaacttcaggccaggagctttgaagcagcaattctcccaacccccgtctccccacccgcagcaaaaacaaataaaaagaaataataaaagaaaaagccctctcagatcggagtgattatgtaattctgcagatgccttgcctttggggcagccactgggacgctgggcagaagcaaattaagtgattagtaaagaaaaaaggcagaggaaaaaaaaaagtcaaaggatgtgaacggagagaaaggaagccttccctgtcgtttcccccgcgactgtacagagaactgctaagaaatgatacttgaagttatatttattattgtaagagggtatgatatttctgggcaggaatgatggatgacaacttgaatttgtgtccagggaatgaaggtgaactgtgacagagttatttatcttgggaatggaggttagggtcagccgaggctgggtgcctgaaggcacaagacattgacaaatttatcctgcaggccgtatctgaagccctttgttttggatcctggctactcactaagtgaccctcatccttcatgttggcaatgcgtgaaggatgcggtgggtgccagcggccccttctcccccgccgcccccgccccgactcctgctactaattcttgtcattcactttgctgacaggcaccaagcccaaactattcccagtcctgaaagggaaggttaaaatatttatttcggctcataatggcctccctgatttagtgcaggatcatttttcctgttgcctttgtcattgcaggtcactggaaggactgagcgcattcaggagcctggaggaactcatcttggacaacaatcagctgggggacgaccttgtgttgccagggttacccagactgcataccttaaccctcaacaagaaccgaatatcctttcctctgcccgctgcccccactccccacccagccccacagtcgtcccccaaccccaccctgcacaaatacctgcaaaatgtcaaatgagttttacgtgtcagctaaattaaagtatgtgaaatacagttcgtgggcagacaaagcattctgtcttctggcactcgggacacttcagagtaatttattataggtcattcataaatgaaacgcaccattatatcttcctgttgctccattttagtgtagagatctaagttatggctgtgaagaaatctttttaatagataaaaatagagaaagaaaataatgtcaccgctgcagaggcagcgaagcccagtctgtttgcttgggcttgtgtgggagggcgacctctggtgggaagtcccgggtaatgccgccaagcaaacttcctctcctgggaggtttctggaaggctctggggcaggcttggggaaccgttttggtgagggaaaggagctaaggtggcagagacatgtgaagcccaggcctggctatgccctcactgggggataccatgctctggtgatgagaggcctaggggacccacgacagtgtatggcctcctctatggaggcaaggacctagtcagcctagggtgagacttacgggcactaactgctctggattctgtagtggggatggaaacagggaacccttgctgcaacctaaggcccgtagctcctgcattgttagtgtagtggattacccggcactagaatgccagctcgatgggacagggagtttccttggttttgttaactcctctgttcttcacactaagaatagtgcctggcaccaagtacaagctcaataaatatttgagggatgaatgcatcattatcattagctattccttattgagcactcctaggaatgaggcatggtgctgggttctttatgtgtgttgttattcatccttaccaagccctgtgagaagggtgtgtcttttccatttacctagacatagaaagaggtgaggtgtaggcacacagccagacactagcaagatgctaggtcctggatgattcagtgtcaactgtgttgtgtccaaagtccaatgtctgcattctactgtgttgcttcagactcagtggtccaatggctttgttttattggatggaacatttgagacctggagtagttaaaccacttgttcacattcatacaataagttagaaatagaaaaggagacaaggcattttcctctagagtataaaataaaatcagatatacatgtaaggcttggcacatatgcatatgccagcatttaagaatgatttgcagaagtatttgttagctactgtttatacttcaagccataagttaatgttttctttattctctcagatattgtctcagtcagctcttgctgctacagcacagtaccgtacatgaggtggcttaaacaacaaacatttatttctcacagtctggaggctggaggtttgagatcaggatgccagcagggttggtttcttggtgaagatactttctcactgtatcatcacatagcagagagagaggaagcaagctttttcaagtctctccttataggggcactgatcccatcagagagatctacccttatgacctaatcacctcccaaaggcctcatctccacataccatcattttggggattagaatttcaacatatgaatttgagggaagaacaaacattcagaccatagtattataaatatgctccttgtggtcattattgtcactttgatagaagtagaaggggagggcctacatgtaaattcacagtctttgtcataatgaaattttggtggaattttcccttcttatgtctgttagtcaaccaagtttcccaatcactctttgaaaaactttgtagtcttatggctttctaggctgtcttagatgatcagttggccaatattctcaaataaatcaaggacagaaggatttttagacatgtcctgtgtcccaggtctccgtagaatattagggtccatggactttggttcatgtctcagcttaatcatatttagcggtgtgaccttggacaagttatcttctgtgagcttctttttctcatttttaaagaaatatgttggactggtcgatggttttattcacagtattgctgtcaccagagataagcaggcctcttggcttcagagtgctgagaggttttctttgtctttggttgagtcctttccctattctgtgcctccacttttccaatctgtagcagtaatgctaagggagtaatggtaatggcctaggagggaccgaagcagaagacactgtgtggctgtaaacctgaccagtgatatcactggtgctgttgtagcacattttcttatcagtgaatattctgaatagacttctttccttttttctcctctgctctactaatgtgattgtgaagatcatcttccccatctacttgactcagaagtcacagagaaaggtaggtaaaatcaggcaataacagcacatgctatcttctcaacccagcacttctgatgccactttttcagctaaatgactctcctacctaactgtgagaatgttgcaggctttccaacaatttctaggttccatattgttattgccaccccatgaaatgctttagatatggcctctatacattagcttttgctgcataataatccaccccaacatttagtggcttaaaacaacaaatatttacaattctatagatcagatgtttggccagggctcagcaggatggttcttctgctagtcttattctgggtcagtcatgcagccacatctacctggaggctcaactggggctggatggtctaagatgacctcactcatatgtctggaggttggtactgggtgttggctaaactacctgtctcttaacaggctagcataagacacttcacatgggaggagtattctaacagcacaagccccatagtacaagtagtcttcaagttcaacttatatcatgtgttaatgtcccatgaccaaagcaagtcacataccaactgtagaacaaatatgggaagggactgcacagggtgtatgtataaagaagcataattcatttctgtaacaatctacccaggagaccttggcattggcatcttgtctccttcagattttactttatatttgtgataaagggagccctagaaacaagtaactattggcctcctaaaaaagtattagctcttttgtgtaaattgaatctttaaacaagttaggaagcttgctgccaaatgaggttttatcttgaatccttttgtgaagttagctttattttaaatttttttggtttgtattttggcatatgtaaaatggttattcaccccacctaccatgtaaaatctagatttttccactttggtttgactcaaagttaaatgtgtctataataatgctgtaggttcctagaccctggacacttgggtcattggcttctttaatcctttagcaagagggattatcacatagtggttaagaacaacaggctctgaaggcagacttcctgagcttctaccctaaacctgccacttttctgcatgaccttgggcaagtgatttaacatctctatgttttggtttcctttgaaaatgcagacaatgctagtacccatcccataggttgttttgaagattattctaagtatctcagacatattagattctagtaacatagtaagtgctatgtaagggttactattattgttgttgttattatcctagagaattgtgtaaactcatctggtttgacttgggccacattgtaaccaaggccagagtacagatatacttctgagtttagaatggttctttgacttgcataatttaatattgccctaatggcattccgtgagttgggtactgttggtgaataattactctcatttttatggaaaaactaggagtggatgagctctctgaagtcacatagattgtcagtagtggggcttagtctagaacccaggtatgctgattcccagctccagactctgaaacccaaaggagcggcaatcattgtacaaggagaggagccaagatacaggaggagtcagcatcctgagcctgcctctgcaaggtcctgctcccagctggggctgctgggagtctgctcttaaaagggattccagagcccagaaccagcatctggaaaatttcttctgtgttcatcagtcaatgcctccctgccatctgcatacctcctgctggacctcccatctttttccaccagccctttttctcattgtgttcagccctcgtgttgatatcctgctctggtatatctgaaagcctggttgtctgagattacctcatctcttggttcgtagggatctcattttctttctttgtttcattgagactggccaggtagtcactggctatggacttgaaccccttccccactgctcacactctttctctctctctctctctcacacccaaccacgagcatgcacacgccatccccaactcttccaccaggaggggtgggatatttggtaatggtctcagccatatcatgtctgaataatcaaccccaagtaaggttgaccacctgaaaattcaggaaagtgtagataacctttgcgcaatcaaatgattctcccccactttccttttggggtgtgtggggggcacataagcagattttatttggaatcacacttcatcttctgtctccctatttgcttcagcacatgtactgaatagccaatgagtttggattatagtgccagcacgaagaaagaatggtgctacatgttacacagctgggctgtggcacggagaccactccagcgagtcagaggtgggactggagttcccatagccatttgctgtgtcatcttaggaacgatttgctgtgtcatcttaggaaagtctctgtaccttgtcaggggcctcagtttctttataaaatggttaacacaaacttcagcatattgttgagaggtttaaatggtataatatgtaggaaatcactttgttaaagactttacaatttcttggcatattttactgttagccaatgcctcgatgcgtcaaaagaagtagcccaaattggaaggaaggatctgaggtacagcacatagcccggtgatggcacctgtgctgtcacacagaaacatgtaagaaccctcatgttccagtgttttaaattttgcttttgtgttaggaaattataagtcactttttcctctagaaatgcagtttctttaagatctgggtttaaatccagactctatcatgtactagctgtgtgaccgttaacccgtttccttaattgttatttcagcatgataaatttctgacatatgtgaataaaaatgaggtatgtcattatgctgtatatttagtattcaaaaacccagtattaggattagctgtggttaaaatcatcccagtggttatggaggttgccctttaacccgcagctgagcccagagggagggatgtgtccattctcacctgggacagctttggacccgcacaactggacacaggctaggaggcttccctcctccctcatgctccaaactttcaaggcaagatgctgctttgatcttgggccctctgcagaaaatctcctttggcaagcctccccatgacagctgggctctgcaatggcaactttctgcagacaacactgaaaaaaaatctcaacgctaagtaccccggagaagacttgataagggaaaccaggtgtgtgccgggaacccagctggagagagttgaaactgtgccaggtagctacacatttttaaaaaaggtacccttaggagaatccctgaaatgatccccactgcagtggtcttgattagccagggacaccaggtttcttccacagattgcctgtggtcaattttctatgcatcttgacaaaaaagaaatgtgagaagttctatgttggatctcaaaaccagccaacataaggctgtgtttgtccttgctgacccaggagacaaagaaaccaattaaaacttctcatgttttatcctctggtggtgctatcagcataaaggcgaaggactggtctagagcatgcatgcagggaggaggtgctagtgcttcctgcctggtgtggatttgggggagaccacctgactcagccaaaagtatcatttatagtaggtagttgaaaggcttaggaagatggagcttctgccatacaaaatacccaaaagcaggcaggctcttagaaatctctttgattcattggcaaaggatggctgaagcttcttggaacctgcagaccccttgcccaggaaagtcccatgatcagagcattcaaatgatccacttctttgtggccagggacagatccaggtttggggagtgtgaaacctctgtaatttgagggagccctcttaaatactatataatcaggaatgcaaaattaggtatgaaatgaatgtttatttggaatagaactgtatcaaaggaaattttaaaattttaagttgataaatttcacaaatgtcaaaatacctagaaaagtatcaatctttattgaagatatgcctctagagaaacttttttcctgcaaatttctcatagtttcattatttggtgaaattttgtaatttttttctagagagaatagataattccctcttttagcatggttgatcgaaaattgattttttaaaatagtttagaaatgtttctttcagtttcaccatttgttattggtagtttcaccactaaattattggtaaaacttttaggattattacattttggagaaactcttacacatttctttcatatatgataggagctgtataagatttcaggacattttggccgggcacagtggctcacacctgtaatcccagaactttgggaggccgaggcaggtggatctcctgagattaggagttcgagacgaacccaggaggcagaggttgcagtgagccgagatcacgccattgcactccagcctgggcgacagagtgagactctgtctcaaaaaaaaagatttcaggacattttaagttgtgtgtgtgttgatgtgtaggcatgtatacatacacttaacaactgaatcttaaatgttctttgaattgatgaatgagtttgttaatcattttgccatcagttttatgttggtccctgcatatttgtgttaatatggtggatagtaagagtattactggaagccattcctactgatactgttggaagaatttaactagacacagaagtgactgcaaattatacaaatattcccccactgaatcataattaaatgttactcctacacaatgtacccttaggtggggattcccatagacattcccattgttactcagctgaagggaaaatgtggtagaagtcctagtggagcgagacagtgatctccacagattatagtgtaaattacctactttttcaaattaaaaaaaaaaaaaatcacatgatcatgtgactctattaccagggtctttcccagggccttggaaggggcctatgcaaacaagaaacccttgacgcatgagctttattagctccatggtagatctacaagtgaaggttcactcaacttaatctaggcctacttccccgaacatggtggccagctaggcttccttcactcgtcattaaatgttgagaaatgactggcatttcaatccaactcagtttcccaatatttcctcaacttaaaagccttgccagtttggggttccattcctgcatatccccaccttcatacagcagacagaaaaaagagccaagctttgaggaatgtttcctaagaggaaagtaggttttggtccgggctttccatctgcagtagagagggcttccctcagtcgtgtagggcccttgtctacgtaaataattagaatcactccaagtcagtatgtcagcaccattctggtagcccactttcttgcagtcccacaaaagaaatactgtgctggccagaagcagtagtcagcttgtctggctgtccttcctggaacaagggcctggccttgaggttttaagacagcctgatccagacatgagttctagtgctccttggagcatctgatgggtcgcatgggtgggctagaaagttggagcaaaccatgaaggggagaaaccaagcctgggactgaggcccgtgcaggtccgggtctaggtccaggcctggggtactctacctgaatgacaccatccagtcctgggtattggaaggggacttaggacattctgaggaaggtacttgaaagcacagggcacctgaggtgtctgtgcccatatctaagggcaatactagcaatgagacttttttctttgtttttttttttttttttcttttgttgttgtagtaatgactgtgaagtatttaaagatagaaactgctagaaaagctgaacttaccctggaattgttcactgtcattttaattggctctatttaaataattttcctgaagagtatgatgattgaactttagtaagtgtattttgtctccagggattttgattcctggccacccacccctctgtactcccaacctcatccccctggtgtgggaccttctctccagtctctatatgaactcccattctcacctcctcattctagtgttcctgtatggccatctctggatgttatttgtgaaagatttgagagattgaaaacaaacttccatgtctatttctctgtctttgtttgggaagcagggaggatgttggtgaattgaagccaacagcaaatgagtgtgctcacaactttcttttgctagtttcccctcttgctagtttccctctcttgctagtttcccctctcttgttagtttccccctcttgcttgtttccccttctcttgctactttcccctcccttgctagtttttcccctctcttgctagtttccccctctcttgctagtttaccttctcttgctagtttttcccctcctttgttagtttccccctctcttgctagtttacctattcttgctagtttttcccctcccttgctagtttccccctctcttgctactttaccctgtcttgctagtttcgccctctggttagtttccctctcttgctagtttcgccctctggttagtttccctctcttgctagtttccccctctggttagtttccctctcttgctagtttccccctctctggttagtttccctctcttgccagtttccccctctcttgctagtttccccctcttgttagtttcctcctcttgctagtttctccctctggttagtttccttctcttgctagtttccccctctcttgttagtttcccctctcttggtagtttccccctctggttagtttcctcctcttgctagtttccccctcttttgctagtttccctctcttgctagtttcacctcttctgcttgtactctgcttctcattgtctctggctgctctcacctagggtatagcatttggccttgcatatgatggtggcagagcatgtgtacaaagaatgcttgaaggaacttagtttggagaataaaagatttaaggaagacatgtgagcttcaaatatctgaagcttcatcatgtggaagagaagaagccttattctttgtgaccccaagcagttaaattgggtcactgagtagaggttagagaaagattcaattccaggggaaaggaaaactgttatggttgtcagaaatggaatgtgctatgtcgtggtgattgcttggcaaatattttagggacccaattccgacattggttggattttgaattcattcttttgtgacaagttgaaatgaagtatgaggaaatctgtgtaacagcccaaggttagataacatcctcacagagcaagaacatcccttttctttgattttaccttctcctaggttcaagtggaccccacttctgggaactgtaatctgagtctttcacgcttgcatatggcatttcttctacccttgtatgttttgttcctgtagctctgctgccattccctggctgggacccccttttatctgccaacttggttaaccctctctcatatgtctctcgaagtcacggcctaaccaggcatgcctatctaaccatcaccttacctaggctcagcttgtctgtatgtggcttaagccaggagttagtatggggactaagttgtcattaaaccctttccagtacctgtgattctgtgaatctatggctcttgctttatttggtttggccatgattggacagtgggtcccactggaagatggctcctggaataatctcccccatcatgcccccctctgacttttctctttcattctctaattccctcactaacagagaaagaatatattttaatgaggccttctgaaataatttctggttttctttttctggtttttttgttttgtttttttcttttgagacagagtctcgctctgtcacctgggggcatgatctctactcactgcaacctccacctcccaggttcaagcgattctcctgcctcagcttcccaagtagctgggattacaggctcctgccatcatgcccagctaatttttgtatttttagtagagacgggtttcaccatgttggccaggctggtctcaaactcctgacctcaaatgatctgcctaccagggcctcccaacgtactggaattacaggtgtgggccaccatgcccagcccttgttttcattactagaaacgaattaagttttatggttttgcatattgtaaaaatattttactctatggaatcttcccttttggtgtgttttagaaacagaactatagaggaaagaaaaatatgatgggacaatcaagtttattcattcttcctcagatgatctggacttagtcttacctgcctagcgaaagttgggctgtgttcccaacagtgggagtgaaaaagtagcaataccgtatacccacagctgaattgatttcagcccccaccctgaggtctcacaggagcagactggactcatcagcgcctgtcagtcatggcctatgctcattgctaagccttttgtcttactggaccaagattcttaacctttgtcacatcactgatttggagaacctgctggatcacttggcagaagtgacaccagctctggagtacctcagtctgctgggcaacgtggcctgtcccaacgagctggtcagcttggaaaaggatgaggaagactacaagagatacaggtgagtgtccaggggttggaccatggtgggaaaagggaaaaagagaaactttaggggatgatattatactctggggtgcatagtagatgtttggtacatatcagtgggtttcccatgacaatgttaaacttttaccttttggtaacctatagccattgtctctcttggttgaggtcacaaaagctaagaaagatgaaaagttattgccttttctactttttttgtgaagtgccagatattaagtattttaggttttccaagttacatggacttgtcacaactactcagccctgctttcataatgcagaagtagtcatacataatttgtgaacaaatgggcatggctttgttccagtaaagctttatttacaaaacagatggcaggccagatttcacccatgggctgtaacttgctgacccctgctctgtgttgtaagatctttctgtggtctgtctcagagtcatcttgaagagagagatgacttcccaccaaaatttagggagctcatagacaatctcaagaggaagtcccacaggcccatacctctccaccatagagctatgccgtggcgcccaccagccatgcgctttgatgggctccaagtagaaatgcttttcgttcttctctctacttctcaaccatgtgctttaaaagccctgatccaaagtcatttagagagtctttttggtcttacccattttaccaaagtcacctaattttccttcttcatttaaaattgtctgtgttctcattgttgattgttgttttgtaaatgctttaatgaccttttcatggacctctctctccattatgacataagctctcattaaacaccccacctgaatcactcttaaaaataacttaataaattttgtatatgtatatatgcatatatacatatatgtctgtgtctatatgtatatgtatgtgtacacacacattcatgcacttgttcatttattcattcattcatggggccaagaagctatgtgtgaagccaaccatgtaggcaagtttttgtaatttttttctagaatgagagaggtagggagggattggtctcaagtacagggcttatgaggttgcaaaaggaaaagaagagctaagaaaaatttttttctattctttttttggtgtatcatcagctctcaaataattactatttgttttttctattgtaactggtcgcattagcaaaagtactaagaccaaggtatgtggggtcagatcagaagatctgatgtggagtccggctttcccagtggggcttttaaaataggaggacagtctatatcagtattccataatcaaggatctacctctgagtcatccaaggtattctgatgcagttggtggcaattacaacacaacagtccataggtgtttctgatgtccagttggctttagaattcggagacactcagctcccaacaagttcaatttcttcctttactgtctcacaccattttatagatcctatcttgtgtattttttctcacttcttcatgtatttccacatctagagaatggcttccagtgggtaggagctgagttgtcttgactcttgaagcctcatcaatgcctaaagtagtgctggatatgaaaaaagggcttggcacctttttttttctggaggtggcttgaaaccacctttccttctcaggaactaggaacttatagggagatgcagggatctttggccatctcagatgcccactgcccatttggaatcagatccatttggatgtcaacaaatgcagctaataagcaaaggactatgattcagactcaatccaagtgctggttgtgggtcatgaatctttagggagggctggattctacaagtgtggtctatctcatgggctagcctgggcaccctccaagcccatcctccccactccagttctgttcccttggaaggagttgaggggtggggctagggaggtggtttgtgagtacacatatgacaaagttgccatgagaggctagattctagaggtcatacaaaaccaaaatcataactagtcaaaattaacttagaaaatttacatcatccacaatgatggcaagatgcttgcactctgagagaatcagggactaggaacagcacaaggaacagtaaatatgttcccatgtagttacacattcactgcacagcaactggttgaagagtggaatggtaggctgattctctagcacatttaaattttttattcatttaatctctttattttttactgttggtttgatgagtgctcacacttgtatatggaaaagatagatatgtgcttgatatagttccattctatggtctgtaagcagatccgctttgtccttcctcgagtttgtgctccatttgccactgagaaattttagggttttgcaatatgacttttgattctggagttcctgtggcatttgtgtttatacaaaacaatgcagctgccttttttttcttttggtaaaacattttcctggcccttcatccacaaaacacgaggtttgccttccttctagctgtttcccagagcctaatagtagagcctctatgtaaatttatgtgacgttttcactagaaaattgcttaaaaatgaatgctatttctagagtttactgtttttcactttaagtacattttctgacaatatgtcttctattaatcatttaagcaatactaggagccttaaaggagtgtattcagaagcaagaacccatggttcatttagtgctgtctgaaaaaaattcttattgattggcatcctctgtggttatgtgatgtaatatttataatatgtcacccaggcatacatcaaaacaagtgtgtctgttgtttcatttccatgggagatgttgatttcaaagaggtcagcccagtttttaggtcacattgtggccaaccactggaccagaaatgggaagtgactcgatttatgtagttattggaaatggcatcacagagcttgagtttctgtggagtctttcctcccctcctcccaaattcacccttttcacttcctcacttaccccctgtgcacccagttggattttcttggcacacatccccaccataaaacaggctcattaaatttatatgtgagcatgaacatacaaccaagttgttgagtagcaccctggccccactggggcaggagcagaactgtgcctggggtttctctttgccattcatcatagttcatggctgagaaatgtccatggccctgttattataggagcttaaacctgtctgtgattttcagtgtgtacacaccatgctgctattttgggatgaatgtggaatggaggtgaatgtgataatcagcagcctccaggatttgggcaggaagagaacagcagtgcaagacttggccggagagaccaccatgctactgagaaaccactttagtgccccttgtggatttcaacgctagccaaaataacaaatcaatatgggaaagttgggtgcccagaatggtctatttcttgtcttcccttgccattgctttttttgtttttgctacagaaagaacaatggacttgaaggttaacagtagacaagtctggacttcacctttcaaataagggagttggtctcatggtcttttagctcttcctctgtcactgaaccctctgtcgttcatcccctcctgccactccagtctctggttggccttgctttactccctcctccctgtagggccttctgtattccttacaactttcaattatttaaaacgtgacaccctttctttgttcccctgcatggagcagccctggggcctgcccagtgtctgcagcactcagccaaagggaaggagggagggaccctccgccgtctggtcgctctgggctgccaccatttcccagacgaataggagctgtaaaacttgtggcttacataacccagtgagcattctccagctaatctacaatctgggctttgaagatcacaagaaagcaaaggtcacgacccagagatcaaagtgacagaagcccacagagtaattgccggttactctctgtagagggccttggtctgtcctgtgggtgtattgtttgcacagagacttcaaacatgctgccggtgaactgtgaggaaaatcagctggcctctgccagttgtcaggcattcatgaatgctgtaggtgagctcacctcggctcattagagtgagattgttgtcatctctctgagcatctgcagttattccactcacactgtttgttcattactctgtggtctttattgactttctcacagtcgtcatttacttggaggtgttgggggtggttatataaggaaattggaataacaagaaaggacgacatggacatttttattgtaagtcaactttgagccacgtagagttcaagcaaggtaacatttgaaagaggcttagacatcatttggcccatccccttcacagcatagatagaaaaactgaggctcagaaaggcagcagagactgaaccaagatcacagggcaagatacactcaagagtctggcctctttcactatgctattagtccccaagctttttgttacaaaaacttgccctccttttatttttctccccaacactttaaaaactttgatctctcaaataggctgcactgaagccattgctaagtttattattattatgaaacatatacgttcagcagttgatcacggcttctgttcagcatgaggtaaccagtgctattaaatggagttaatgtaatctagtcaacagtgaggaagcatgatgttttgttgacggactcatctatcccatcaagctttgtgaaagattgagaatggctcacagatcacccactgctgccttcaggggtctcaggtagcgcatcagtagcttgtaccatgtctcactgcctccaaagaatagaagcaagaaggcagcaagaaataatgcaaagaagcatagactgccgtaaacggaagaaaattttaaaaacgaaacaaaactctaatgaccccatgcccagttccctcaagaattggaaacttggtacttcttgaatagagtgtcagagaaaaaaacatgtcagccaaccccattcgcagaccgtggaggcccatctgagcttttctgtggttgtaaggtgttcctggggagcagccattgccctggggggagcagccattgccctggggataacagttacaggcagggggaaagaacatcctcctctctctctcaggtctggatgaaaaatgcctgagtgttgggactagagcagagaaaattgattttggaaagaaagaaaaaaaaggtatttctcctgttccttttctcctcctagcggttttagctctctccttagaggagtcctttaagcaaatggaacattctatgtgagaagaaagaggacctgaaaagctcaatgtgctggtctctcagatttaggaaatctgtttccagacagagacaaatgggtctttaagcaccttcccaggatccctgctctcctcttgataaccccaccttctgtatctcagccaagagcacctctgactctcacccccacccctcaccacccccagccttgggggctttcccctagccaccttgagaaggtcaggaaaattggagttgccctctggagctagggacgtgagacttagaacttagaccgatctcttttcattaagcagtgccctggcttaacaagcagttttataaatctgaagctgtctccgggtgtcgcaggatttatagacgggggtttctgccataaagtggtttatgatggctgccttctgtgttattagtagctgtctcttccttcaaccattgctgtttgataatagccttaaaacacccagaattacttacctgcaaaccctattcccgatagcccctgttgacagtctgaataagtttagtgcccttttgttgtactttaccttcaaaacaaactgattgaaccatcaatagctcgtggaagctgacagagggatgtcatctggactagcccttgtgattgcaggttatctgggggagttaaccttcccgcattgttaactgaaatgttttatgtactatgcaactttaggatacggctgtgataaccccagtaactaagtaatacatcacagtaaagagattttggtgcaacaaataacccaggattaaatttacaagggttgaattgatattgtaaaagccttcattctgtggctttgggaatcctctcttgtatttttatggcaaacttgtattacactcaggattgaagctgtgccttttgacaccctgacatgacctagaacaaagggaaatagatctcccaggaccatgaaaggacaggcaagcaggaagcccactgacttatcacttggcaataatgtttggagcgagttccaagccaccaaggggcaagaagatctggcagacatggccactggctgggttctgtgcactgcaggcattggggcagggcagcccttagcagaactggaaggagaccctttgctgcctcaccaccctcctaatttcaaagctattattcctcatggtgttattttcacgaggacattggttctcagcaggactagcagcatcagcatcacctggggacatattagaaatgtaaatttcaggcccagttccagaaatactgaatcagaaactctggggatggggccctgccatctgtgtgttgggaagtctccaggaaatactgatgcccactgaagtttgagaaccactgtgcaagaatagaagctcactgaaagagcacagatcttctgcattgcttttatctcctcatgttggtacttgactcaggtcctgacacacagtagctgttccataattattgttgaacgagtgaatgtatgagtaagtaaatgaaagaagacatctctatggaggaactttggaccctgggctgaatctcagatggaactatttggggcaagtcctcctagtgtccctcacacctctccaagcagcaaccacttggaaacccaggctggcccacgggatgggtgaaaatcatccctcatttcagggggtgactggcagcctgtgtcatgggctgtctcttcgattgtataagaagagtgatctgaaaacagcagctctttgtcatctaaaatttttaactagcttaaaagccagcacctctgtctctctctttctcctttgatttcagggctgtgatccaaagtgaggcaaaatgacaatgtgcggtctgttgtcatcatggttcctgccagccccgtgaaggcatccttcactccatcgttaaacattggctgattttctaatactgatgttttcttcacctgaatattcatcttttcccaccctacacttagtgggtgtctttactccctgcacgtcactcctgacatattgtttctgtctgtacatgtctttatttgaaagagtctgttgtcataaagacttttctgctacaagcagaagacggaagttttctctgacattgactgaggccggtgggagctctactggaggatagaaaagatatttggtggtggttcatgcctgtaattccagcagatggatcacttgaggtcaggagtttgagtccagcctggccaacatggtgaaacgctgtctctactaaaaatacaaaaataagccaggagtagtggcacacacatgtagtcccagctacttgggaggctgagacaggggaattgcttgaacctgggaggcagaggttgcagtgagcagagatcatgccactgctctccaacctgggcaacagagcaagactccatctcaaaaaaaaaaaaaaaaaaaaaaaaaaaaaaagaaaaagaaaagaaagaaacaaagaaaggaaagatatttgggtgttttgtggcactttcttgattttgggtgaggttagcaggtatttggagggaaggcagaacccagggtaggaaaaggacaatagactgaggccagggaggaaacaggaagtagccagagtcaaatttccaggacaccaggcatggggtggacatttctgaaggaagaaaagaatttcataatattttgactttaacaatgagtcctgtgaaggttattcctgcagacctctaaactattctctctggctttgggatggtcagccaagccttttacctggataagcatatgcaggccacttggtgataatgtcaccgaatccttgggttgttacttcctcagttgggaacctctgtgactggtggttcctttgcctgagttttgcttgggcctgctgagcttgttccacctactcggcctggtgggctgcacttggctcgtgctgccagttcagatcccatgcctgccaagggtgagccaggtgtggagtggtaaggggtacatgagcaagcaagcacagggtctggccactgcatacagccaggcatgctggaagcagcaggctgggcagctctagacactggcatgggcactagctccctgtgaggctgcatctggaccaggcataccacaaccagcttccactgcaggcactggggaacgtggtggcacctggaagcttgaagatgccaggaaccacagagccccaaagagggtgtcacagcctttgcttggggagctgttaggtctgggctccccaaagggccacagctcttctctctgtctcatcacccaccatgtggcgagtggggggacatgtttcagccctgtttgtgttacagctctttcagtcctgccatttggtgggtcccaagttgttgtcccagatccaggaagaatgaagcatgcacacaattggagggtgagcaaggcaaagaggtgctttattaagcaacagtacagctctcaggacaactaaagtgggtagctcctttctgcaggcaggtcatctcagtttctgtgcagccctcagcagagaggagacccagagtgggtagctcctctccacaggcaggttgttccatcaactgcccaagtctggctgagtctggggcttttatgggcatcagaggaaaggaagtgcatgctgattggtccatgggtggccacagcagggtccagaaaaagtaccatatgttctcactctgatttacgaaactggtagcccagcccctatgctttaggccacctctggcctgatggtggggtttcaccggggacacacccctttccacctaggagcctgtctgcctcctgctgccagccatcaacctgctgtctatagtgcccatggtgcccaggctgtttgtgccaagggatgcctgcaggcccatgctgagctgtcctctgctgtcccttggcctccctgctgtgctcatcagcacccaaagtccagaaggggctgaggtggcagggggctggtgtttcagtactgctccgagcatgtacacactcagccagattgtgacagtgcctgggcttggccgccactttgctccaaaattggagtgggcattgggagtcgggagaggccaggcagtgggagcaggcactcccaagccttccagtggaggggggcttcccaagcccccaagagcacagggatgcctgggtctgcagctgcagctgggcagctgcagttgcacctgggagcaggggctcctgccccaccaactcaggagggcatggggctcccacctgttcctggctcctgccagctccatagagcaagcagcccctactgcagctggtgtatttgcagcaattgctccagatgggctgctactgccaccaataatgagaccaccttacgaatgtggaaggtggccttgggaacccaaggctccagtgaaggcaagccacactgttccaagtaacatcctcactgaggaatagctaggttcttggggttgccttaaggtgtggttccttgatgcccatttgagatttcctgtttctccttttccattgagttttcagtcagtagacctcttgctctgtgctcccataaccactctatgcataacctcgattttggcacttagctatgcttattcctaatttctccatgtgagtgtataatttctgttacactgagaacacctttgagagcaggaagcatgttgtaatcacatctgtatccctaaggcctggcacatagtaggtgatcaagaaatatctgtgcaactgaaatcaactggtatgttattgactccattctaatgccagttttcaagatgtggtgagagtgagcaaataaatttgtccctgccttcaagaagcttacagtttgggtaaggacattaatgaacaccaagaaaataattagaaaacaacaaaatgttagactgtaaggtgctgatggcatattctaggagtcctgggaagggagaaagcaatgaagggtggaggtgtacaaaaaaaccttcacaggagatgaggcttgaaagatgagtatatgctgaggaggctgggtataggaaggaaatgacagattcccttggagataatccattgctcttgacactgtgtacttacctcttgataagcagaatagggtggaaacaactcgcttgtttgattgttggactatggaacttgatggaaagcatcttggttagtgattgtccctgacgagggagaagtatagacacatgtccatacctgttatacatttatttatgcatttatataactataccctggccaagtggttattcttgtcaactccatatatacctatttgaggacagttaattacactagcagccattggcttatttctggagtccatctgccaaggaattcttccagggaaatggagagcacctagcatttgttgggccattaatatctcctagaaattaactcccccttttctccttgataatcttcataggttagcaagtgtggaaataaccacatgtattatcgagggatgatgcgaacaaagttcttaagacccctgcctgattcctcaaggaagcatttctcagctacatgtgttcctcacttgtaacccacagtcatccaggtcattatagtctatgatacagatgacccataggaatggcagtgacgtaaagggtacaatcaatttataggtttattttactgagaatttctgtgtagcaaagaagctgagcctgttttctagactggaaggaagggcatgcgttgatagggtgccactggctaacccacgtgtgtgtgtgtgtgtttacctttgagccaagtgtaccattagtgtgtgcttctaatgtttagttgtgcatgtgtgtaagatagaatcattctgacttctccaaggaacagttgtttattctttgtgaaagaagagaggaggcgcagccaaggtctaagttccagaagaccggatggtgtggattcttgaagatcagacaagctgtcgggatctctgaggctgccactcaaacttcctgagttgtctctgactcttatcttccagatgctttgttctgtacaagctgcccaacttgaaatttctggatgcccagaaagtaaccagacaagaacgagaggaggcgttggtcagaggagtcttcatgaaggtggtgaagcccaaggtgagctgcctacttgctgttcttcacaagggatttacatctcatggcagtgcttacaccccagggcatgcagaatgtcctctgagtgtttagaatgcagttggaatctcacatgaagggtccttccatggatacattgttggccaaacatgaaatagggttaggtgtaaattggatcttcctgttttaccaataaagcagcactatgcatagcccaatggtgaagttctgtgggggactgcaggtctccttcttggaaatattcactaagtggggcctctgcaggtttgcagctgagaaaggagaaagaggaaagcattgggcatgggtgggctttggggtaggggggattcttctagtacttcagagggggactttcttgtttgccaccaaagggaagctagggaagagtgattttcttccatcacaggcaagggctccacggccctctgagatatcgttagtgtggaaggtgatgttttctgacagtgtgtccctaggctggcatgtgccccccacatgtatctctccagagctgattagagtggtgtttactgacctttcctttaccagctgagtctgtaagtgaatttggtgtcatgctaatggcagctctgatgaggcagtggagaattggcttggggtcttggattcagacacaaggagattttttaaggacatggatgactatctctttgggaggagttgggagtccttcagtgaagccagaggctggggaatggactcggtgacccctgatgatctccttggagaaccatcattgccttgaggctctgtggagctgtgtggtcacctcccatgagattgcaacttgtgtgttgaaaatgctggcactgatatcctagaagtctagtttatcctcagctattgacttatagcactctgcatgtgcattggaaatgattaaaggggggaaagaaaaaacaaaaacaaaacagaacaatgaaacatcttccatcaagttgctctgctggcagcagacctcaggccactttctttccctgaatccatgaggtgcaacttattttccattatgctgaataaaattgctagcagttgtggaaatatgtgatatggagggtatattactggcagataaatgtattgttacctctttcagcatgtgggaaattaattgagtgattcatttcatagctattaaagtgttaacagtgctccctatcgaggcacaggtttgatgtattgcacacaactgcctttagttattctagcttttgtaatttttccaaatgaaataatttatttcttggccttctttttatttgtttttggtgaaaacagtccagagatagccagcatgaccaaacccagcaaaagtacaacaaatgcactctataatatcctgggttattataaataacctgcccaccctacatatctcaccttcttgtatacatctgtattcacgtgtatacctgtgtgcagagtggatcagtatttctcctgcgctcattgactttgatgtgggcagctctacattgtcacacaaaatctgaaggggtaataaatgtagtacccaccatatctggatggggcactcagtgcatgcccaccccccattcttctaaggttcttggtgcacagatctacaagtgttcacatcatcctctaaagtagaaggaaggggtcactggctcgctttatgggtgagggaactgagggctggagaagttaactgggctgccccaggtcacctggctagtaattgtggagctggaggtttaccttgtgtctgaccactgggcccacactcttctctctctgctttctcacccctggagcagtgagctacatatttaccctgtggatctctttgttcaaacaaaacctcctaaggtctaaatgaggaaaacaggtaagagcaggactgttctgttgagtagaggtgggaggaatcgaaatccttccttgcttttgaaagtatctgagactggctccttaaaatccagcattagttgtttctgagtcattagcaacatcagcagaaatgccctttagggttcccaattagtttctaatcaattctagaattagttcatgtttgtatgattgactccaatatccttactaactgtattaagctttaaaaagcctgttaaggtgtaaattagttcaaccattgtggaaagcagtatggcaattcctcagagagctaaaaacagaactaccatttgacctagcaatcctattactgggtatatactgaaaggaatataaatcattctatcataaagacacatacatgtggatattcccagcaacactattcacaatagcaaagacatggaatcagcctaaatgcccatcagtgacagatcagataaagaaaatgtgatacgtatacactatggaatactatgcagccatacaaaagaacgagatcatatcttttgtgggaacatggatggagctggaggccattattcttagcaaactaatgcaggaacagaaaaacaaatacatattcttacttacaggtagaagctaaatgatgagaactcatgaacacaaagaagggaacaacagacataggggcctacttgaggctgaagattgggaggagagagaggagcagaaaaaataactattaggtactaggcttggtacctgggtatgaaataatctctacaacaaacccccgtgacacaagtttacctatgtaaccaacctgcatatttacccccaaacctaaaacaaaagtttaaaaaaatacctgttaattatttgaggagagagactaaagtactcttacaaagtatggtgatcttggttctctttctgtagtcacatgatttccagaccaaagaggacttagaaatcacctagtctgtgctcccgtttcatggatgagggagctgggagagggtgtagtttcctgaggctccatggaattgggaccagaacccctgggggtctgggcttccagttaagtgttcaatttatgccatgattcttcaagtgcccaggacgattcttctgtgttcttggtttcatatcgaactggatgcctacattgaatggcaggcagttcccttttgtctgttattttcagagataggcagtggtacttttcttgtagaaagaaagacgccaaatgagctccttgctgaattaataaattggcattaaaaaggctggttctcacctgttcacggtgtgtacagacatatgtttgttcccatgcaggtgtgtatacccgcttccgtctctgtgtatatatacatatgcatgttctgggaggtatgtgtacaccagagtcagcttctaagtggcaagcaatttcctttccatgtgttgctgctgctgtgctgagcacactcagggaagacctatttttcacgatggaatcggaatctcaagctggctcctgtcctttccagggcagccaaggcctgttgtgcttattcagcagaatgctctgatggatgattaaggtggccgtgatttggggagctattttcattttattcctgacataaagaatttgggagaatggaaaatgtccctccaatcacagctcttgccttggaggtagggaaacgggcagtctgggtgttctcggctgacacaaatgcagaaccatccaggaggtaataaaggcccgatgtcgcagaggtctgattgggtacctggcaggcgctggcgcttgagtgcaagtcctcactccctttctcccatgatgacacatttctcctccgtggctgccttttagcttttgttgtttcaaagctggcttctgtctgagctctgattgttgtagagaaagatgctgtcattcattaggaagtgatagctgaatgctacaatggatgcttccagactttatctctctgtgtgtgtgtgtgtgtgtgtgtgtgtgtgtgtgtgtgtgttattagttgatggacctgcaacagctaggctttgtcatttccaaaattcaaatatataaaatatatataactttatcaaatattggccattgaatcatgccattgttaatacagagaacaccacactggatacagagaaggttcaagcccccaaagaaagagcccgctagtaaccaaactgtgaagcccctcactgcactgggaaacatagatcaaaggggtgcagaggcctgtccaggatgacgtgtgtggtcggcatgtcagccctgcacagcagagagacagctcaaaaatccgacagtcagaattgtttaattatgtcctgactttgtaattattcatccctgttctggcaaagagcacagttgtcatttctttgacataattatttaaagctgagccctcttgtttacaggcatgtatacaaagttggctaccaactgtttaatcttcagaatcttaaaggagcctaaggagggcaactctagaaagtgttttgacgcttatgttttgcttgcattaatatccatcctcatagggaagatgtggtaataaatatgtctgtgagtagtgaggtgtctttgaagacatgtcacttgtttgtttatgtgggcacagtgtgttcaaacgtatgttttttcccatgcaggtgtgtataccagcttcaatctctctgtgtgtatacatatgcatgttctgggaggtatgtgtacaccagagtcagcttctaagtggcgagcgatttcctttcctgatttttccacctgattttcccatcgtgtagtttgtgtatttgtgtagtttgttgtagcttgtatatttgtgtgtgtgcctacgttttgatacttgggagggtgggctattgtgtatgtgtgtgtgtgcatgtgtgtttgtgtgtgatagaaagaaggaaggagagggagggagatgccctgtgttgaagaaataaactttggagtacatgcatttccaaaagtctctcttattcttttcccctaaactgaaaattggaaactatttgggcctgagaatcacctgctcccacaaataccctacatagtcctgccattgactcttggagttaggtcctcactcccctgggtacctttagtttcttccatctgtgtctgtgtttttaggtttccatgcaaaaggccatctaggatgaagacggaatgattcataaggaagctggcttctcattgggatgaggaagctgctcgcccctggggtgccagctccatgagggcaggaaccttgtgttttgttcgtttctgtatctctagtacctagtctatagcagaggctcagtcaatactcatcaaaggaatgaaccatgaacagcagagcatattggaagatccatcatgaaaaggttgttgtatgtgttctaattacttcagtcaacatggttacattaaaaggcaggaaagaaaccattgcctttagactgtgtgttaattgccacctgtacactggcagaaaagacagattctgggcatcgtatttgtttttccaaaggattttcctgggattatttatgatgggaaaacctactactaccacaatccccatgacttggcttttccactgggtagcatttcacggggaggcaagggtgtgatctgaagctgcgttctcctcgtcactcggggtggtactggagtcctccttctttctcaacccacctgctcatattagggcttttaggaagtaagtagctcttctcatgaaacatgttagggtacccacaagtctgtgtgtagttacaatgaaattttccgtcttcgccgctattgtattttttgtctatacctaaaggagcactacctagttgcttctttgctacacttaattgttttttatgcctagtgtagcactttactaagtgctatcttattctaaactacactgcgtatgtctttgatatcttctgttactcctatgtagcccaattgcaaatgcataaaagggtatcagaaactacttctaggtttattacaattactgtcctttatactcaatattttcaagaatatatattttatataaagccaggacatgcctataaataaacattataaatcacaagtacattcagttcaacagaccatcagccaatatattttgaaagttctccacagtgccaaacattcaaaaaataatttaaaatattggttgtttttctggatgtttccaactacctgaatgtgctcatgtttttatgatttttttttctgttttcatgcagatgtttcttgtctagagacatattcagattctattttcagtttctttctagtaaattttggagagaggaaaattttttaattaactgttttttttaagaaaatgcttagatggtgtgttcaaaaacaactctgggagccaaacatttgcagtttgtttgttttttcaaccttattcctgacttcacagtttgcacgttcatttgagggagaatcacttaaagattttgtatttctccatttttagaaccatggcatcctgtgcctcaagcaaatgcttttggagtattgctctttggaggcggcctctgtagccttgcatttgggtagcaaccctctaaaataaaaaaatagagcactgcaggaaagccatgtctctggtgtgctggtgaaaccaaaatacacaatagaaagaaggaaggtggtagcagcctcttaggggcattcccaggagtcctaggggccttgccaggtgctgagcacatagtagagactactgtccatgaagccagtgcctgggggatgttactgtttccctgatgggacctctggcttgcccagctccccaatggcccagcttcaccctcttcctctttttagcctcccacatgctcgctgctgtccaaagatgcttagatggatgtatcaagaggatcatggaagtaagtagcattttttaagtgttggggataagatgagtaactcttggatactttgtcctgcctctgcaacccaacaactgggagaagtgtggtagattgcattgtttgtctaaaaccattcctttctctctgcccttgctgtggctccccatctaagggaggaatacacttccccattccattgactttggccttggccatgtaactccttgaccaatgggatgcgagtggaagtgacagcatgacaattctgggccaaggccttacacagcaccatgtgttttcactcactgctcgcacacgtctgccatttgctatgaaaacaacatgagagacaccatgaccagacctgaacctgacttgaggcctgcaaacatcccagccaaccacagacctctacatgagaaagaaatgcttgtaataagccactaagattttgagcagtagtgtgctgactaatacctaggcaggccatcccatccacacaccctacctctgctgcatctctggccattgaaccagggtcttaactggaacacaacttggagttttgtgaggttagtggcagtcattggtgccacagcaccaactactgtagggtttctgggtacttaactaattaggatagcagggccagtctagaggtcaactggctgcctagtggtacattagatgcacagaaacttccctgatatgtgagttagaagaacatgcattaagtagtcactgtctgctagctattgtaccagctgcttaacaattttatctctaattttctccctacaaatgaggaaactgatgatcagataaattatatacataacctaaaattacagagcaaggtggaaccaggtcctttttttcccccgggtcttcctaagccccaaaactcatgttctttcccctctatgccttgaattacttcagggaaaaaagtcacactcaaagcttgtgctcttcccactgtatcccttacatttcattaacaaggcatacatttctgatggaaggcaggggtgaaagagcaggaagatcaggagatagaaggcagccagaggcaactttgtaatttccaattttaaccctgtgatgactccccataacatattttggtgaaatacatgggctaggcaaagaactacaggagccaggctgtggggggatctctgagttaggtcaggtttgcagtttcccctgagggtgaggaggaaccttggcagagtttgaagtgggaaaaaagtctgggcaggcctgtatttgcatccctgggtatctgggagagggagccttagagctctgtgcagagcaggtgctttggtgatgtggaaatctgtgcaacagcaggcactggtctgaggctgccacagtgttcccagcacccaggccagtgtcagtgctcaggcagctacaggggttagagagctgtgtctaaagaagctctgggatagcagagatgggtccatgtaagagtgagtagctctgattctgggacaaggagacagctgatggctgtcagagacccactagtgactcccccttaaagggagttcacaacatctcgaaaatgttctttgacatgttcttacctcaaagcccctgtcccttatagtattcactgtctcgttttaaggagtaaatttaagtcttcctaactgggccataaaaagttgtcattcgcatgatcactggcaatgactaagatggagcctttatttgtctttagtctgcacattatcagcttgacattttcttgatccactttggaaaagtatctttggcattttgtttgtgcaatgtagattctttttatcattatttttattaagtttgaaaggaaagagaagagggaaaaggagaggaaaataaagatgtttacttaagaaattgggttctggagagtaaagttagggttctgatttaaagttatccatatttaaaaccaacattacccggggttctgtgcagagctacagggcaggactggctgctgttcttcagctatgggtgcatgggtgagcttgacaaatccttcccatgcttttgtccatcctccagcccacccctcccaattctttgctttgagcttggtgattctaggctagtgatgaagaagaataagttggaaatgcaggggcaacttgtctaggaacagggaaaaaaggccaatgactgacgtatgagtaaaaggagaatcatgatggcctcggcatcccctcccctccattagaccagggccttgctgtctttcctgaactctacagcttaatagagctctgtcttcctcagaaagacccttctgggcccatggaaacatcagactgtaggattctagagactgaactctcaggccattgtgtatccttgaaggcagggaaacctgcaagaagggggcaggcagaggccaaccacacagatgccaggccactagagaaacatcatgaacattgttctgaagctgccttcaatgacatgtgcatgtatttgcaattccatggctaaggaagaaggagaaaacagggatggcatggtcccattttctactctgcagttctggctatttccaaaccacctgctactataggtaatagcagataagaagagcaaattgtaagaagaaaatataaaagaaaactcatgtaagctcagtgatgaaatgaatgtttctgatacttaacatttacctgatctttttgttgttcccaaaagcaaagttgtggagaagataaagtagtaagataatcttagggcagcagtcaccaacgtttctggcaccagggactagttttttggaagacaattattccacagactgggggtggggatgggggatgatttctggatgaaactgctccacctcagatcatcaggcattagattctcataaggagcctacaacctagatccctcacatgcacagttcacaatagggtttgaactcctatgagaatctgatgccaccactgatctgacaggaggcagagcccaggcagtaatgctcgctcaccagccgctcacctcctgctgtgtggccttgtatctaatagaccacagaccagtacatgtctgtagccccgggattggtgttggagacccctgccttagggtgtccaacctgaacagagttaaaagtcttcacaacatttggaagaaaaatgtgatgatggtctgaatgcggctgatatgtactttcagggtaccctttggaggagtgtcaaacaggtatgcctaggcaagtaccagcatgcagtagcacgcaagtaatggcaccccgttccaccaccctgcagactcagtgaggggccagatgctcacaagagaggggcttctcatttcaaaagaaattatctctgccctttatcccaaatggtccattgagaagcaaagagaacatctttctttcctgtttccccagagagcctgtttctcctcaccaacacctctagaacatccaagttcccagacagctgttggatccggcttgagagtctgctacaaccctctgggaggtgtgtttttgcctagaagttgttttgcccacctgtggtcaccatagcttccttctggggcctgtatacacactcagattccaaatgcatcttctttgtcactctgaccagcagaagtgccatttcacaagcatgatggggaaggcttgtccttggggtcactgaaggctggtgctacaattagcccttctgtttgcttttctgctccttacagtagagtgtcttagatgaacagacagggctccatcaataatgcacagatgctctgtaattgggacttcctttgatgttaatttagctaagttcaacgccattgtcagtgatagcaattacgtgcagccttttcaccaaggacattttaggataattttatttttcatgtgcattttaaaatatggcagtaaattttgagctacattacctgaattagaactcattatttattttcaacagtgaactaatactctgtctaggctccaaagctgtcttttttttttttttcttttttgaagtgggggatatgtactggggcttctactttatgcagtttttaactcttgagtgaaatttagaagtgagtcacctcttctttttttgttgagcattttgaattgtcacagaggctatctggctcggtgacctgtcacgtatttttgttgggcccatttttattcactcctcccccattccacagcctttacttttgttcttgacacaatttaaggagttgcctccagctgtttttctggggaggttttaagtctgaatttattgtagctgttgagttccatggaaaacctgcaattcttaatttgttcatgagctgttgttggatttgctgctccatttggggactgggcccactccaagtttcagggtaatgtttaggtttggattaaaggctggacttctacctcctgttattggttgccttattaaaatggggaatgtaatgccttccaagtctgttgggggattaaatgagataatctgtggcaggagctaatgcaggctctggtctaaagcatcagtagcagctagtgttcttagtcatgtaatttcaacttacaaggactctttttgtggcactgctgtgtcatcaagatgtgtgggtgaatgtgaggaaggtaattttggcttgagatgctggggggcaggtacctaagtcagcttgggataccataacaaaatgccattgactagatgtcttaaacaacagaaatgcattttcttgcagttctgaagtccagaagttcaaggtcagggtgccagcatggttgggttcaggtgtgggctctcttcctggcttgtagatggctaccttctcactgcactctccactcatggtggagaaagtaaagaaagagaaggagatctctccgtcttctgatgaaaccacagtcctattggattagggtctcatttaaccttaattacctcctaaagatattgtctccaggtagagtcccattgcagggtagagcttgaacgtgtgaatttgggggtacgcattcagtccacagcagggggcattgcccctctatttctggtggcttaactaagttttctggaatttatccttaaatgaaatacttctgctcttctgagacatctacttcctagtaagagtaaaatacctaaaagaaaggaatgtgagaggggaaagaaggcctcacattcatcctggggaggtccaggctcctgagcttgggcatctcctcagccaccgcacgagacccttttgttcttgtgggaatggtagagggaagcagtagggcaggtgaaggcatgggaggagtaagcatggcgtgggggacgggaggctccttgccactgatggagccaggagcatgaaggtgcagctgccctctggacagctgtggaggagagaggtctccatacaggaccaatgcgggaaaggatgcctggtgcagaagtgagcccttaagctctttcatttgagtgacctcgcactcaactctcttaatcctcctctaattcccttggcgaatctggaaatgaaggctgatgtttagatcctagaatttgtcattggaatcaggcccctctgcccccagagtgaaatgaaaaaactggggaatgaaatttgggagcttgttacacatgtccaaagaatattatcccatcatcagaagggttttgaaacccaagattgagatattggctctttagacaattagaaaacagccaagtactgtattatgaaacaaacaaacaaaaaaatctgttcagtttaatgctagaaaaagagaaagagaggttctaacttctgtactcattctaatttttagtcatgggatgttttggagaagattagattacaaaatatttttttcttctttgtgttcagaaaagcctcaataccaacttgcagcctctacacttttagatgccagaggcctaagctgaaaatatgaattgtgtttgcttaggtaaaaatgaacagggcgagtaagcggaataaagaataaaaagcttttccttctttgctttccctcccctcttcctttgcacattatatgactaaatgtgcaactttgttcacataactgctacaaacagttcactgtgtaggccaaacgctctcttatgcagtaaaattaagaaataatatgctttgaaagtgatttatgagtgtggttaaactgccagatttacaaagaaatagttcagatcttgggaagcctcaggagtcacgtcaaaaatgaatttgaccatgatttaaactgctacttttcttacatgacatttaatatgtgtactttggaggcccatatgtctttaataaaatagcattaagttttaaatatgatatgaatgcagccagtttctaaattcataaccttttccacaactccaaaatgctaaccaataagggagtcatacacgcaataaaacataaaccttagaaaatagctttttattaaaatggttagacagttggcagctgggttgcaatgtaataaatacttacagcattgtgggtttatcagacgttgtttaccctgcaagcaactgggaccagacaactaattatagcccctgccacaagagcagttcaagctgagtccccctgagtatatcgaagatgcaggatagtttgtgttgagggccctggacagggagtccagagatttgggctctaatccctctccaccacttaaaggggtgtgaccttgggcaagtccctccatttttccaacttctccaatctgtgtcacagagataataatgcctggcaggcagttctgcagtgctgatagataagaaacatctgacaccagtgcttggcacatagtaggtgctcagtaaagagaaacaattctttttaaaaacagcctttaattaaaaaaaaaagtattttaggctagaccttcatgtcattctagcagtgatgttttatgatgactctaggttggccccaagagaagtttaaccacttagccagagatcagtgtaaacatcatgaaaaatgaacatggagctccttgtctctctcacctcttgaaggaacaagcatgggagaatggcagaaggacatatttggttcagggggaatgggagtgtcctggtggccactgctactttcctgttcccagagatgaaagggaggtgtgcaacactgttccttcttgcctttggctttcccattcatagtgaaggtgacttatctttgtaaactgctctttatcacagcctaaggtctttgagtacttctgctgctgctgtgtgtgaatgcatctgcagacctttctgtggagtagtcttgaagtaggccttccagtctccatgtttccagatgcataggaacagctggtgtttccagcatcgcagatgaaacagccagtctggcagtggtctgattgtgtttgtccatgcaaccaaatcttaccaccccccacaaacctccttagcagggaattcctgaattccctaaaatggaagttgtacattatatttgagcctagattttgaatctcagggcacagacatatgtgtggttatcaaagatgaaaagaccaaggaaccacttcattttgttttgttttgtgttgtttttatattttttaacaatgttatggtttcattaagggaaattaacaaagaaaatccttcaactctattccctatatgtgactctatgacacatgtagggaatatgtgtgttcccttccaaaccgtatccttttctaaatgtgtttagaaatccttttctaaatgtgttcttgatgtgtttaatgttttactttttacttaaaatttttattacttattttgtattcctcaaatatattctttctatggactgtataattctctatcaagttgacctaagtactattagttaccaaaccattttcccaccgttcctggattttaaccttatgtataaaatactgctagttgtatgtatgtgcagggtatgtgtgtgtgtgtatgtgtgtttcctttaaattacttccttaggataatttttcatggctgggcttattgggtcacaaggtgtgggcacacaagcggttttaggctctgcctaaggattccagggtgccatttttcaagttggcagcctatcttggctgagtcattgcacctacccaggctagagggaatgtaggtcaaaaggaacacttaacatttccaagaccttctttggaaatgagtttcctagagtcttattggtgggtatggttctagaagcaaggcttagattctgtacaaagcatgcattgacctgctaagttgtagtcctagggaattacgggttccctagagcatcctgaaaattattagtggcacgaagtcctgatcagtgtgaatgtgccttcagactgtaagccaaatctttgcataataccaatcattctacctataaaagcacaaatatgttattgttctcaatagccaatttaatgcggctttggggaggaaaaaaagagaaaagaagattacaagctggctgatcttgcttttatttctcttaaatctatccacacttctcaggggttatacttgtttaaagattgtatgcaactgtgcagtctgtgtgatttggaaagcaaatcaaactaaatatgaagttttcagcatgtgctgtttttaaaggatttcatgcatttattccaaatatacatttcttcccaagtagcactaaacctataatctttttcttgttacatttgtttttcggggggtgggaggccaagagggtgacttagctttggagtggaaggttcctattaacatctacctccttcttgtgcagcattattcacagcagagctattaaggctaattattttcaggtttctatcaaagggggatatttgagctgacaaaaaaatgcatttattgggaagacaaatggcctgtttaaataagaaagggaccattatcatctacagcttccacccccctcccagttattagcctatatagggaggaggaaccagagacccatgggagactgtaagtcagaggaggttctgggggaccgtgctcactaaaatgcctggaaccccaagaagggaagtagattttcctatcatgtctgtagcccacctgaattgttcattgactttggagctggtgtcagcctgtcatttttttttcctcctaggtgaaattcattgacccttgatgtgttatggaaagaatattggttgaggagctacatgtattagtcaggggaaactaactgctgtaacaaacagtcccagatcccggtggtttagtcagtctccattcactgataactccttgatggagagtgaggagtgtccagggacctaggcttcttccatgcaatggctctgcatttttcttgggccttgagtccttcctgggttcagcccatggatggagcaagcatgagaacatggaggattgaacaggaggatccacagtctgggtttttgggtggcacacatcacttctgcccattggccaaaactcaggcatatgaacattcataactgcaaaaaagcctgggaaatgcggacattgtgcactgacctgtgtccgctcaaaactcatatgttgatgccctcacctcagattgtgactgcatttggaagtagagagcctttaaagaggtaatttagttaaaatgagactgttaaggtgggccctaatccatctggctgtttcccttataagaagaggagattaagacatgcaaagaggcatcaggggtgcccatgcacagagagatgaccaagtaaagaggcagcaagagagttgccctgtgcaagccaaggagagaggtctcaggagaaaccagccctgtgggcaccttgatcttggacttccagactccagaactataagaaaagaaaggtctgttatttaagccacccaatcaatgatattttgtatttcagccctggaaaactaatacagcagctcaaatgagtgctccaaaacaaaagtcagtgtatttggtaaacattgagccagcatctaccatactgagcacttgtgttttggccccactgcaatagtcagctactgtaaacccttgggcaagtctagtttgtcctccagggctcagattgctcatctgtaaaatgggtacagtgatgcagatgaactctgagggtctccctatggttttgtgacctggatggtgcacagtccctcagctggcatcttggtcaggtaggggtccagtatctggcctactgtggtggtacactgaaggacccagattttagggttcaacctggattcaaatccccactctcccattggctatgggattttgagtaaatgagtgtctgccttagttacctcatctttaaaatgaggttaataaaaataaatacctgaaagtgttgctggattaagggattaaaggaaataatgaatatactgtaaagtacttattccagggcttcgtgcccaataaagacttaataactttgggctgggcgcggtggctcatgcctgtaatcccagcactttgggaggccgaggtgggtgggtcacgaggtcgggagatcaagaccatcctggctaacacggtgaaaacccgtctctactaaaaatacataaaattagctggacgtggtggcgggtgcctgtagtcccagctacttgggaggctgaggcaggagaatggcgtgaacccaggaggcggagcttgcaatgagccgagaccgccatgccactgcactccagcctgggcgacagagcgagactccatctcaaaaaaaaaaaaaaaaaaaaaaagacttaacaactttgtatctcctcctctctctttctctttcttcttttttgccttttaatttttctgcatattttgtaattattttcatgtaagcatcctgaatgtgaagatagagagtgggaagcattgtcacgcacgtgatctcattttatcctcatgagaggataagacagatgaagtggagccttattttacaaataaagagcactaagatgggggagttgtgggattcactgacaattccagagaaaagtgaaagtgagatcgaacttgggcctcctcttggcccagtgctgtgttgttacatgatctctaacctggccattctgggtatttcagggctcaggagatgacatgattcaggaaaggagagctggagtcatcaaccaatgccaggtccctaaagttccctcaggaagcacaaaatggaaatggcagctctttcaagggtcgggcagacaacaaacaaatatgttgcatttatagccaggaatagaaagaacatggttaacctccaaaagttcctgaatccatctgatgaagatgatgttgacttgacctagtttgggaccagggtttacttttctttgtgctccacgttacctggacttctccacacttctgagagtcagggacatggcctcgaaacaatgtttgtcctatatgtctagcttgccacagctctcatcttcaaaccaccagttcttggttttatatacatggcagaagatgccccagggccaggagttcccatcccaaatcataggctgaggatgcagcaccagggccaggaaggaagggaggaatagagatgacatattcatgtcctggttctgttgaccatgcttgagcttcagagccaggcaccatcctcctacttagaggtgatggcgaccagacagtcttttaagagaaaaagtatattttgcttcacttttattcaaaacaagctttctagagggctgaaattttggatgcactagagacagctggagatcttcaagctataggaaaatgacaatgaattcagcctttctgctatctctttcctgtagggcaggttatctgtctttgtcatggctaatggcaatttatgctatccatgaccactgggaaagaaaaatattcatatttttaaaatgaactgagacagatcacttctctatcagggacatggtcatgctagaaggaaggaagtagagtttccaaggtcatagtttctcagtgttttctgggaggtcaccatttatttatgatcttatcatttgagtttcaaaattaggatgaattctgctggaaccttaaaaataatttgaagtgatgagggcagaagaagctgctcaaatcctgtgcttttcaggaaatagggtactttttagatttgccaagcagcaacgacattgtcacccagaggtttagctggaaggtaacatacctgaagcctcaagattggggcattttcaggccatctatgaaaatgaaatatcccaagcccaccattagtattctcaagctatgaaagaagatggtttaggtcatttctcaggccatgccctctggtatacttggcctggatatattcaacttgtattctcattcctacccctaactgcaatattaacattttttttttttttttttttttttttttttttttttgagatggagtctcgctctgtcgcccaggctgtattgcagtggtgtgatctcagctcactgcaagttctgcctcccgggttcaggctattctcctgcctcagcctcccaagtagctgggactacaggcgtccaccacgagtccggctaattttttgtatttttagtagagacgtgttttcactgtgttagccaggatggtctcgatctcctgacctcgtgatctgcccgtctcggcctcccaaagtgctgggattacagacatgagccacggctcccggccaatattaactcttgaacacgtgtttacacaggtgaccttcagctatttaagcacagacgttccataatggaagggcagcaccagaaattcccagcttttgagaaaattattggacctgttattactggaaggaggagaaccaagatgaggtgatttaggatatttatctagaagatgagggaattaatacatagaggcatctgcctctctttgcattccaccaaacagcttaaaaggaatttcagggctgggtgcggtggctcatgcctgtaatcccagcactttgggaagctgagacgggtggatcatgaggtcaggagatcgagaccatcctggctaacacggtgaaaccccgtctctactaaaaatacaaaaaaattagccggacatggtggtaggtgcttgtagccccagctacttgggaggctgaggcaggagaatggcgtgaacccaggaggcagagcttgcagtgagctgagatcgcgccatgcactccagcctgggcgacagagcgagattctgtctcaaaaacaaaaacaaacaaacaaaaaaaatggatttcaggtgattctttttggaaggtctttcttctcacccattggctagtttctacccattaacaccaagcctcagtttttccattcttcttcccactcattcatccatcttatatttactttgtttatcagggtccttggaaggatttgggtagaaaaggaactaaaacagccttagccttcacagggagcactttctagggaagatggactcaagtctttcctctgtctcactatgctgacctcttctacagttgcttgggtgcctacaaattttttctcctttgtgtgcctgatgaagtctacaaatgttatagactgaatattttaaataatttgacctttgtgccttatagtactcttattccctttttattgtcacattctgttagaatggaatgaacagaattcttcaaagggctttttagattgccgtttgatctgactgtggagggaagaatgatagagagttgggtgtgcagttttgcacacttctgggtgaatgggcagtatgcatgtcatctgcctccctccaggctgaccacatgggctcctcagggaaaacacagcccagccagggggagtgggggtgggtctcttcagatgtatggaagtccttgtgtgaagagccctatgtggctttcaacaataaagtctcattgagttggaggcagtttggaaaaaggcttggagccccacattagatggataccagaagaccaacatcccattataaaaagaaagtccttacatcaaaatatttaaaccaaagggaaaggcccaagaagtatggaaaagaaacaagaaaataagcaaaagtagtgaaagtatttccttccaggacatcagaagctagaccatggctctagtctagaatcatctgataatgatggagatggattttttgttcttaaaaagaatgctctggataagtcatttcatgtcagcttttataacagttaggagtaagggaagagacctgccttcatcttgccagtctttttaggtgtgttggtccttacctgccaggaatttggtaaacttcatagcatagagccttctgtctggggtatccgtggtcatttgctgccagctctaagttttcttttgtgatttctggcctcatttcccactgttctgcagtgtattttttcagtttaactagatcagtgtatgtctcaagttcttcttcctcctcctcctcccttcccttcgaaatagatatgccttcattattgttcgcccaatctcttcactcactcatctaccttctagggaatatatatctcaccttctttctctcatcaatccttcggtgcccaactcagattctgtcctctatgaagccccctttcagaattcccagaccccagagctttcctttaactacatctttaagccatattatattttcaaatatttgaatatatccatcttgctttcccaagtgagaaggcaaggaatgtatctcatctaccttctgtttaccccatggggccaaacttagggatggtcctatattatcccttagtatttagcatcttctactacactgagctatactgagacagtcaccttcttccccatggccaattaccagggaagacccaatgcaccagcactcagttctctcaccaagtgttattctgaaaatatgtgtatgagacagtggccagccttggaccagagggaaattctgcaattctgcaatttatgtggatgcttgctagaggtcacaccacaaggccactgtccacatatcagctttgtctcaggagctgactcatgttttttatataaatcatagtgagttgcccattataaacaccttgtaacattcaaaaggctttatggctgttattagctactgcagttgtgatttactagctaattcaggctgatgtgtagatgagtgtgcccagggcaccatttgtcccatctacataagtcagagagtagaataggctgggtactcaaaagcaaatgtctcttccgacggcctgtggcatgtcagggcttgcttatattttcagttagcaggtcagcagtctctcctctctaggtgggctgtgtcttcacaccttgacacctccatccaagagcccttggtgggaagcacggctgtaacagacagtttgtgttcagcgctttcactaaagacttccttattgcaggcagaaaagaaaataaagttgtgagagaaatatctggaatggccctggtgacacctttatgtttcccagtgcattcagcatcagattttgtattggcttctagttagcagtagtcacacttaccacttgttctttttttccaatgaaagtatctggcaggatgcggtgactcatgcctgtaatcccagcactttgggaggccaaggtgggaggattgtttgagcccaggagttcaagaaaagcctgggaaacatggcaaaatcctatctataaaaaatacaaaaattagccgggtgtggtggtgcctgtagtcccagctgctcaggaggctgagcctggggaggttgaggctgcagtgagccatgatcacaccactgcactccaagctgggtgacagaatgagactccatctcaaaaataagtgaaagtaacactattggattgcctgtggtgtgtacatttatataaaatcagatatagccacagattgtgtttaggatgacatatgttttacgtaacatgtttatttgtattaatgttttaggtttttgctttctttttaatcctactaattgcctaagatgagatgaaagaaaattcacctatacaagtggtattctgctcttctggatctgaaaacagggactaaactgagtaaaacttataaagtagtttgtagtttatttgacagggagaaaaattatagaaacacacatgtatataaaatgtgtgtatgtacacacatacatgcttaccagatgagcacattatatgtttatatacttactatatagctatatatgcatgttatgtaatacatatattaaacactatcccttactttgttgtatagatttctgctttgattggctcacatttaatagacaatatctcttcttagtttcagatttcggtgccatagaaccaagtagcttgggtaggaggtagttctttgcaattccaaatcctcatccttcagcctctaactacagttgactctcaaacaacacaggtttaggactgcacagattcacctacctgaggatttttttcaaccaaatgaagatcaaaaattgaaattctcgggatgccaaacccatgtatatggaacaccaacttttcatattccatagggccaactgtgggacttgactatgcgtggatctgtgtatacgcagggggccctcaagccaattccccttgtctatcaagggatgactgtactaagttgacctagaaagtgtgatatttgaattgtacccttgcctcaggcttgatttccctgcctgtcactttggggtgagctgtccaacatggcaaggtttgtcttctaaatggttgcatcatccacaaaatcaggaaacagatttatttgtatctgttgtagttagtgcttttgcccgtgggtttctggtgggaggagcgagaactaggcagcctttgtacctgtgactcaaaggaaataagtctagcattttccattagatgtttattgctcaccgagaattggcttagaaacctgtattgagttgttacaaggaataaagctgaatgagatcagactttggagaaatcagagaaatgtaaattaatataagaataaatgatcaccttgtacccattaggctgggataattgaaaaaccaggtaatggcaaacgttagtgggatgtggggttataggaaccctcatgccctactggtagagttacagtaattctggagtacaggctggcttcattgagctgaattaatatactcatatcctgtgcccagcaagtccactctaagataaatatcccgatgaaattcttgcataggtccataaggaagttcgtaggaggattttcattaatgtattatttgtagtggtagaaagttgaagccagctttgagttgaaggaaattccaggagattggaaggtagaatgtggtagatgccttggagtactgagcaacaattagaagcagggattcagtggatgcatggcaacatgacctagattgcattgactacatgtgcttgtttcctgtgcttttgataaactgacatctggggctgggctaaccagggaaagactgtccttcccagggctagccaattcttagagattgcaaatgactcacttagaggtgtgcctttgatatgcaaaggaacaaatccagagcccctgctgtgaaccacttcctctctctggctcctacactctaggagacagaattcctctgccctaatcatcccaggaccagtcaagacagccagtcctacttctgcttaccttgcctggcccatctcgtcccagaaccaccacagtcaagactttactgcctccttctgccttgttgcctacccagatgcttccatgtggggccctgtgtaacatggcatgccccctcctcttgggaactagagtaagctatgttttcaatggcagtcatcccctgatctgttggcctcaccacacctaaataattttataacataggtataaaataaagtcacttcatggcttggcacagtggctcacgcctctaattccagcactttgggaggccaaggtgggtggatcacctgagatcaggagttcgagaccagcctggccaacatggtgaaaccccgtctctactaaaaaaacaaacaaaaaattagccagatgtggtggcgtgagcctgtaattccagctactcaggaggttgaggcaggagaatcacttgaacccgacaggcgaaggttgcagtgagctgagatcgcgccattgcactccagcctgggcaacagagctagactgcatctcaaaaaaaaaaaaaaaaaggggctctagtgcatcttgtggggaagaagttggttgaaccttgtttaaccgtttgtttcccaagctcatttgaccatgaacccttcctggtagcacctacttacttaaatatgaagcttggtggtgaacctctcagggtacttgagcctttctttctagcagagggctttgggctcctgagcaacattcatgaacggaggaagactgtgtggacaagtggctagggaaaggcacaacaatttgttggagaagaagccattaactgagataccacctcttccttagtatccaagggacttggctcagtaggaatattatgttttttcttttcttttcttttctctatttatttatttatttatttgagacggagtcttgctctgtcacccaggctggagtacagtggtgtgatcttggcttaccacaacctctgcctcccgagttcaagcaattctcctgcctcagcctcccaggtagctggggttatgggtatgtgccactgcgcccagctaatttttttttttttttttttttttttttttttgtagagtcagggttttaccatgttggccaggctggtcttgaactcctgacctcaagtaatctgcccaccttggcctcccaaagtactgggaatataggcgtgagccactgtgcccagccatattatgttttttcaaaccagaaagatatttggttcaagtcatagttttcaatcattgtgacctttggcaagtcctttgaattcttttggttcagttttctcgttggcaaatgcagctttgaaacttaacttcataggtttatgttgaaggttaaaaatgatatatgtaaagtatctggcacttagtagtaggttagtaaaaattagccactgttaagacattattatcaaaattattaatatcttcatttgatcttttatgaggactaacagtgaacctattcacaattagccatgtgactatagaagtggcttactcaaggtcacattgctcattaatagcaggggtgggactacaatttacttctcttaggtccttgctcaatgtcatcttcattacactggaccaagggtccttttgcctatttcgtgactgaaggaactcagcacaagctctttcagtggactgaatggaccacttcattgcagcactggagagagatgcgggatgggattcagagggcctggggtgccactgggatttttgcttcagttatactctgcatccttgttaataacctagagaaggttgtaaagaatatgctcattatatctgtattttcccctaaatggagaggtattacaaaccccaccaatgacagagacgtgacataaagggacctggagctgtcaggcatatggacaggaaatcactagatgagattcagctgcaataaatgcatcctaatacatctggggacaaataatccgaaacacagatattcaatgggaggaagatatttggaaagcagtaaatgctgaaggggacctgggggatactggacagcaaattagatgtgggttttcattgtgttaggccaacagaaattggtaatgcaatcttgcgctgtattttccagcagtcccctggagcagctgggaggagaaagcctctttcaccagccaagatcaagtctgctcgccccacacactcctgaagaatggcctggctggggctggggtggagggaggggtcgctttactttcccctggcccctacctcacagggatggtgactttcctttctctaagccttaccctgaccctgtgtccttggagagtcggtctctttcctgtctcccagcgtcttgctgcagaatgctgtgggatgttggtctgcctgggacagccaagggaggacagtcctgcctggaaagtcctggtctgcagggaagacttggcctcaggtgtttgtttccatgtaagctaaacatagccatcttttctagtgatcctggcttcctccccgctctccctcacactcacacccccatcctcttcctcatgaaggatttcacctgcagatagcctctatagacagaggaatatttgacaaaacacaagcatctgccccagcagctgttcccagcaatggggatcagtcaccaactcctcccacctcctccttctcatgcttcactcttctgcaccaccccccgcccaattttatagtcttctcaagtttaaagacttcccttgacatgcataaaaccaaatttctcttctggggaccagtgaacacatattctgatttttttctagttcctcgccttaccccattctcaggaaagcccagttacttcgtgagttcagagcacttccttgctggggcgcctgctaagtggggtgagtttaactggagcacccctcccaacttttgggaaagagttcactctcaccaacccatactttctgcctttccttctctgggattgtcttacctctggaaatccttcagggacttctagggaatggctatgtcaatggggctggtaaaaagcagctgtgggctggtaaatgtcagaagctgtttgcaaggctgggaaaattcactgtttatttcttcaaacaagccctagtttcctccactgagaatgttcttcatcaaactcatcattcaggtttgtattcagagcagtttagcttaggcatgcaattgtcagtcaacactcgtaagtaagtggccaagtttaaagttactctttgaatatttctatacactctattcagtaagtgttcaccaagtcccttctctgtggctaccacacagctaaatactcatgtgtatatgtgtgggagagagagcgttttactctcgtggaggggcccgaatgaaaaaggcatcaccgtggaagaacttgagctttcagtcctgataggtcatggatataaatggatggcagctgctagcacagtgatttatgagtgatgctcccagccaaaggaagtcaggcacattctagaactgcagaccgctgtgtacagggcatctcagtatatttagcaaaatgagattgcaaaccacagaaaaaagggctgagtgggtggagaggaagaacattctctggccagaaacttgctgaactttgaggccagggaccggaggctttgcagaggtggggagagacgttctttggcttgtccgacagaaataaatcaccactgaggagatataccaaaggccaattatatggagtgttttcttggaaaatcatctcccagacaggccctgtaaatcatccccagcattggcagacattcagatctgcctggtggggcgggtggcatgccagtgcaccccagtgtcaggtagaggaattacacaggggtagtctcgttgtagcagggaaaacagaggtcaggtactagctgtcttcatccgaggaagcagtgtagggcagaactgtttgttctgtcctaggaattgtagggccaaggcttttgaccaggttttgccacttacttgttctgcgactttcagattctctacaaacagagtggggactgggttatctctgaggttcctagaagccctgacattaattttatgcctttgtgttctctataacttctgcatagcgtaagcttttgcataccacaccctatgctggtaattatcccaagagagacaaaaatttccatctacccagcaaggttagtcatacaggatcatcttgggagggtgattggggtccctcaaagccaggtcctcagtgtagctgtagagagagatgggaatttagcctggagaatgaagagctaagggggatgccagaggtactgtgttcaatattggaagggcttcatgtggaagagggatccgtgtctgttgtcctactctgtaggccaaaaacaggaccaatgaactgcaaatagaggggcccaaaaggaaggaaaagataaaccagcaatcattattccattgctcagtgacacaaactttgatttcctcagtgtttgaaaatatagcaagaactcttaactggccaaatgtggtggctcacacctgttataccagcactttgggaggctagagtggaaggattgcttgagcctgggagttcaagaccagcctgggcaacatgcagaccctgtctctacaaaacaaacaaacaaaaaattatctggacaaggtgtacctatagtcccagctacttgggaggctcaggtgggagtatcacttgaacccgggaggttgaggctacagtgagccgtgattataccactgcactccagcctgggtgacagcaagacacacaaagtctcacagacacacaaaaagaactctaaccatcagaactatccaacagtggcacctaaacctggcagagcggaaagtgatccatcactgctgtaatctagccgaggctgggtgacagtcatggtcacagcagagaggacaggatgctcctttctgctctatctgtaaccatcttctgtccctggaatgagctgagtgaggaatgctctccctcctctcctcaaagtatcttccttgtcccagcaaagcttcattcttcctattgaggaggggttcatttatctctaggagagttatcttaaaatttgtctactttttggagaaaatatatattgagactttgagggtgggaatttaattggttgccaataaacaggaaggccccaagggaaagaaatgagaattagaaactgactcacaatatctggatgggaagccaggcaggagggaaactcaggctctcgaaagggaaatctgttgggcacccagcttacttcttaattaccttttttgttaatggccagcccattccttatgggtttgttgttggtgggtttacttaaacctttttgaaatatattggttattttagcttgtactgattctggaggcaatgaatccacaaagttaataaaataattcttccatcatcttaaaattatttcttcattcaagcttcaagatttccttcttcttcccatattctagaatgaacaattgttttttctttatttatcttctttgtgattctattgattctgttgggatcccttctcagtctttgactttctttctagacaaagccctcctaattgttctcattagtttgagtatgacaattctgtccgtgtgattaattcaacacacacctaacatttattaagttcctactctatggaagtcgttgagcgagacactgaggctagaggtgaaaaagacacttttcttgccattctttatacaggattgtagcagaaccaaattagttgtaatgaatagagtgctatgatacatgatgcaaacactggccattgttcatgaggtcactttcatctacctcctgtgacagatgaaatcactgagactctgagaatttcagtgaatcactcaagttcctacagctggtaaatggcagagctggggtctgaatccagggctgtctgactccaaagcctgcatcctttccactgtgcaacacttccctttgtttgattgtcgatggaaatacagagaaacatgtgacttaagaatgagttggggaacttaattgcactggtgaaaaatgaagacattttataataaaacacataggaagatgaagtagaaagtttaccagtgtcctgggatcctccgcaaccactttgaggagaatctgagctcttggtatgcaggcttggaatcatggctctgtctggcgttggacataaaatggtagacttgatgcagactccagctcagtcatccttgtctgttatgcttggaggcgacagctctgcatgaacccattaactcagagagatttcggcagagcctttcccttccctgaccactgggcacgagtgcaccactctgctctgagctgatcagctttccatatgcacggaacaaccacagcctccctccccatctttcatcacctaaataagggcagttaatgtttaagagtagagaatagggaacataatgatggataaattataagtttggggatatgaaaagtcaaactgtgtaaatatgtattttaaaccacaaacagaatgttaatgcatctttcccattaactcactaactgaaattacagagtgtaacgtgagccaacgcccacgggttggttatgatgttttcagatttagaacagcaaatgataaatgcccttctctcagacaaagaagcgattgacacagcttttcaatgtagtcactggcaatgtcagcagtggaaaataaactgagcaccaggaggagagacgtcctgagatacctgcggaaagtggagtgtgggctactgttaagcacctcctgtatatgggggaatgtctcaggggtcggtgcagcccctccgagcagtgaggacccaggcgccattgcctggactgcctttctggattagagggaaggcttgttttctcaagcatcagctctatcttgctctgggttggtgggcagctgccgtgaagccagtttcactgtggctaggtttgggttggggatgtgtggtttttgcatcagccatttcattgtttggttgcttatgggcagcagtgtaaaagagaggttaagaggatgtggagaaattagaaccctcgtgtgctgttggtgggaatgcaaaatgctatggaatagtatggtggttcctcaaaaaaattaaaagtagaattactgtactatatgatccggcaattctgcttctgagtgtataccccaaagagttgaaagcagagtctctaagagatatttgaacacccatgttcgtagcagcattattcacaatagccaaaaggtggaaacaaaggaactattgacagatgaatggagaaacaacatgtggtcagtatattcagtggaatattattcagccctaaaaatgaaggcacttctgacacatgctacaacatggatgaaacttgaagccattgtgctaagtgaaataaaacactcacaaaaagacaaatatgattctacttatattcagagagacagtagaagaggggtcgtgaggggctgggaagagaaggaaatggggagttattgtttcacatgtacagagttttggttttggaagaggaagagttctggagactgtaccacaatgtgaatgtatttaccactactgagctatatatttagaaatggttaagatggtaaattttgtgttatgtgtattttaccacatataatattactgcatctttgtaagagaaggagaaggaatccagctttagggacttgggtagattcactgctgctgtttacttgctgtatgactttgaacaaattagtaaacactgtaagcctgctcttctcaactgtgaaataatatctgctgtaagggttgtaaaatagcgagtactcaataaatgtcagcatccctcactttggtgtttcagaaatcctctcttatgcccaccccaaactgttctcctgaaataaacatggtggacgtgtgtgtgtgtgtgtgtgtgtgtgtgtgtgtgtgtgtgtgtctgtgtgtaaaatctttgtatacatggtaagttatgcatggacttctttctgggctgaagtttggctctattaacgtttcttcacaaagatggattccttccctttgataccatctctgcactttgtccagttcccctgcatgtctttaattgaaggatcagaaagtaaatggggtatcctggagagactgcagcctgggcattgtatacctcacttcttgttagcctggtggtcctcatggcccttgggcagctcactcatagtcacttgggggtgctcagtctttctcatcccaccccaggatctgcctccctggtgcttcctccctgccatgcatccccctcccaccaactcccttcatccccaaactcccaccccttcttttagaggtagagtctctctttgttgcccaggctagagtacagtggtgatcatggttcattgtaacctcaaactcctgggctcagttgatcctcctgcctcagcctcctgagtagctgggactacaggtgtgtgccaccacatctgggtgatttaaaaaaaaaatttttttgtatagatggggtctatgttgcccaagttggtcttgaactcctggcctcaaggatcctggtgccttggcctttcaaagtgttgggattacagatgtgagccaccagtatccccctttcactggcttttgacactttcttggcctcttttggccctgagccaagtaaccctagggcatatttcaggaggaggttgttggcatttctgaagcctgtgggacaatttggctgtatgcaaatggttgagggtcattttcccctgaaggttaaatggtgaccctggtcaatgtttagctagtgtgcacttaaatgatttcccctagttaatgaatcataggacaaattagctgaggactttcgcaccctgcaggtaagctggggtggtaagaactggtaatactgaaattgtgttgagttatgtaggctatgcagtgcaggatctgcttagcacagctttccggtgcttagatcctaattacaaatgtaaattgagggctgcaactgttggagagccaccaaatgatgacctggatatacttatttctgagcctgctcaaacatccctcctcttcaccttaggaagccctatatccaatctctcttcctctatccctgtcattcccaaattgtgtgctgagactccccagagtgctgcagcagactcacagggatgatacgggatattttaaatgtttgaaggcaatacaaccacatgcaacatctgacagacgctatgtgaattaccatctcaggtgtttcacagtttcatcattagatcatgctacaattctttggataatactgtatctttgcaaagttgcataatttttttcggtagttgctgtgattaaaagcaagtgtgtatggaataggaaatgtggatggcagtgcctaatatgtacaattccaatattaaggaagttgtgcagggcccaataggtacacacatccctttagtaaacaagtgtgaatcttgaagaatgaaataaaaatgtttcctttcaatttatgcatttttttatcaaatggctattgagttattaggacataaatacttattaagttgttccataaaatggaactcaggtatttcttttggtccgtgggctctccctggaaaacattactgagaccgttagggcaccatgaactaagttggagagttattgttattattattttttgagatggagttttgctcttgttgcccaggctggagtgcagtgacatgatctcggttcactgcaacctctgcctcccaggttcaagcgattctcctgcctcagcctcccgagtagctgggattacaggcgcccgccaccatgaccagctaatttttgtatttttagtagagacggggtttcaccatgttggccgggctggtcttgaactcctgagctcaagtgattctcccaaagtgttgggattacaggtgcaagccaccatgcccagccaaattggagagttattatagacaaaaaaaaaaaaaagaaaggatcttcccctccttaccttcatcagtcctcccactgtgaactctcccttctgaacaaactcactgtgtcccttatatctctctttcttcaccattagctccttctcccacctgaaagatgaagtttcattgatcctttaaaaataaaagaaagaaaatcaagccttgtcgaatgttgttaccacctcctcttccattctcctttccttctcctcctccttctcctccatctttccctttccttcattgcccgacttaagaacagtcttgtcccgattcctttactgctcatatcatatccacattgctaaaaccttgtctggctttgtcccctgctgctgcctttatgtggccctcaccagggtcactgacaagttccaaataaccaacccaacgccactcatatatctgcatcatagtcacaataagctgaggtctcacgttcccccacctgatattttggcttctgctggttcctgtgtctagaacatctgcagctgtgttaccttctcattaataacagtggtgttgatagctcatcttgagtttccttctcccatagagcctctggggacctcaatacccccttaccacgctatccgccaaaatgctcagaggtatttgaagccacaggctgtaccacacagttttgtgtcctctgtagtactttcacacacagtaggaaggtagtaaatatgggtttgaaaggagcagcactgttcagaataggtggtccagactttggtctcccaggaacccctgctaacatatgctgaaagaacctataggtatgatgaggttggcttctgagatggaacgatagactccaaatctttctctcaacttaccaaatagagacctttctttctcattatataagtaatgcatgtgtactgtagataagttagaaaatgaataccaaggaaaggaataaagcttatatttagaaataacaactacttatacttgtatttttatatattaactgttagaattttatttccgtatatgtgaaagatatatatttatgaagtataaataggattatattttacttgtttctttatgatctccttttgttgcttaggaacactacatatggtgaaatagaatagatgaatttaataaaagttacatagtattttatattacactattgctcattattatttttaattttgaaaatatatattacatcattattccaggaaattatctatatcagtactactcaaaggtgtccatggactggtgccagtatgaaaattaatacaggtccatgatataagtacaggaattacgagtaaggcttcagaaacttttaaaggaaagtaacattcccatatctggtaactcattttagaaactatttttaatacaaaatattacatattaaatgcttattaacagaagtaactactattaaaatcattccatattttacacatatttcaccacctaaccaccccccagtgcccgcccagattttttcatataactgggaagccacagtccatattattcttccactggcttttttcacttagtaggtttctttccaagaaggtaccaaagagaaaaattgagatagaatctattgaaggttcttgaggaataatttacttatagtaaaatttacccttagtgtagagttccatgaaattaacccaagtgtagagtctggacaaagatgtctgataattatcataacaatcaagataatgaacagttacctttctggaaaattacctcctgtaccttagtagtcaaccatccccaaccatccctaccatccccacttcctggcaatgctgattctatttctgatcctaaaatgttgcctttttgagaaataaatggaatcataccatagtttggactctggcttcttttacttatcataacgcatgtaagatctatctatattgttgcaatgtatcagtagttcattcttttttattgccgagcagtttttcacatatggatgtactactatttgtttatccattcataagctgaggggcagttagtccagattttggtgattatgaataaagctgctattaacatttgcatagaatttttgtgtgaacatgaaatttgtgtgtggacgtgttttcatttcttttgggtaattacttggaagttggattgctaagtctcgtgatacatgtatgtttaactgtgtaagaaattgccagactgtttttcaaagtggctggctgtatcattttgcattgcttccagcaatgtatgaatgttccagttctactcacttgctatatataacttgatattgtcaatatctttttgttttagttttagtttcaatttttgcctttccaatagatgtgtaatgatatctatgccattgtggtcataatttgcattttcttaatgactaatgatgttgggtaccttttcatatgcttacttgggattcacacatcatctttggttaaagtcggttcaaatcttttgtccatttaaaaaagtgggttgtcgggaggcggagcttgcagtgagccgagatcgtgccactgcactccagcctgggagacagcgagactccgtctcagaaaaaaaaaaaaaaagtgggttgtttgattttttatattgagttttgagatttctttatatcatttagatataagtcattttgagatatgtattttgaaaatactttatcccggtctgtatcttcctttttcattttattaacagtgtcttttgaagagcaaaagttttaaagtttgataaagtccactttatcaacatttttcttttataagtcatagttttggtagcgtatctaacaagtcttggctaataaaagattataaagattttctcttgttttattttcaaaattttatagctctagtttttacatttaagtgtatgatccactttgagttattacttgtatatggtgccaggcataggtcatgggttgtttttgtttttttgtatacagatattgaactgcttcagcttcatttgttgaaaaggcctgcctttctcctgcttgcctttcatctttgtcaaaaattaattggccatgtacattggtctctatctttagactctattctatctcactgatttatgtgtctatcctttcatcagtattacattgtcttaatcactgtatagtgtattttgaaatcaagtagtagaagtcctctgattttgtacttttttgacaaattattttgggtattctagttcttttgcatttccctgtaaattttaatatcagcttgttaatttctataaaaaattttgctgggactttcagattctgttgactatgtagtgcatttttgagagaattgacatcttaacaatattgagtctgtgaagatggtatctctctctattaatttagatctttttataacttttaatctgttttataattttcagcatataaatcttgctcatactttgttagatttgtacataaatattgtatgtgctttgtgctattataaatggtatgagcttcgaaattttaatttccaattgttcattgctagtttcactttgctaagcttacttattatttctgagtgattttgtaaattgagattttttttttcaaattgacaatcatgttacttttatttttattttattttattttattttattttatttgagacagagtcttgctctgtcggccaggctggagtgcagtggcatgctcttggctcactgcaacctccgcctcccaggctcaaacaattctcctgcttcagcctcctgagtagctgagattacaggcatgtgccaccatgcctggcttatttttgtatttttggtagagatggggtttcaccatgttggccaggctggtcttgaactcctgacctcaggtaatctgcctgcctcagcctcccaaagtgctgggattacaggcgtgagccaccgtgcccggcttcatgttgcttttaaatagagacagttttatttcctcagtttcaattcttagattctttaattatttttattgccttattctaccacttagaacaacagtacttagaatcacagtaacttagtaccacaattccacagtactatgtaaaacaggcataatgcatgcagatatctttgccttaatcccagtcttgaaaggaagacagccaggctatcacaactaagtatgaagttagctatagattttttgcaaacgtcctctatcagattgaagatgttttcttctatctctagtttgctgaaagtttttatcattaataatgttgaattttgtcaaatgtttttctgcattcattgaggtgagtatatagtttattttctttagtctgtgtatatggtgaatttcattgattgatttttgaatattgaaccagccttgcattcccaggataaaccctacttggtaatgacatatttttaatattaatatattgctagatttgatttattaatattttgttgtagattttaattttaaactgatactaattgtacttattcatgtgatactttgtgatatttcaataaatataatgtatagtgatcagatgaggataattagcatatctattatctcacatatttatcatttctttgcattggggaaattcaatatcctctctagctatttaaaactatgtattattgttaactatagtcatcccacagtggtctaaaacactaaaacttatttcccctttctagccatattttcttcatctatgtttgtaattaatattggtctatagttttcttgtgatattttatctgattttggtgtcagtgtgtaatacgttatacaatgaatttaaaagtgttccctcctattttctagaagcatttgtgtagaatttgtattattctctacttatatgtttggtagaattcactagcaaatatatctaatgaatatagatacattcattagacatgtagttttttatcacttttgttgtcaaagttgtcagaagatttttaactacaaatacaatttctttaattggcagagggctattcagattatctatttccttttaggatgagatttggtaattggtgtcttcaaagggatttgacaatgccatttaaatacaatttagggtcctaaagtttgtaatattctttcattatcattttaatatcttaaatatctgtattagcgtcccatctttcattgctgatattgacaacttgtactttcttcttttttttcatattaaatctgactagaagtctatcagttgtattgacttttttttaaagaactagattttggtactactaatgtaaccgcccagcaggttcaccttacctgttgcctagacagagccaatttatcaagatgggcaattgcaatacagaaagagttattcacccagagccagctgtgtgggagactggagttttattattactccaatcagtctctccaagcatttaggaatcagagtgtttaaggacaatttggtgggtagaacccagtgagtcaggagtgctgattggtcaggttggagatgaaataatagggaggtgaagctgtcctcttgcattgagtcagttcctgggtgagggctaccagatgagccagtttatcaatctggatggtgctagctgattcatcaagtgcagggtctgcaaaatatctcaagcattgatcttaggttttacgatagtgatgttatcctgaggagcaattttgggagggtcagaatcttgtgccttccagctacatgactcctaaaccataatttctaatcttgtagctaatatgttagtcctacctacaaaggccatctagtccccaggcaagaaggaggtttgtttcaagaaaggtctgttattgtctttgttttgaagttaaactattaatataaactaagttcctcccaaagttaatttgacctatgcccaggaatgaacaaggacagcctggaggttagaagcaagaaggagttgattaggtcagatctctttcactatctcagctataattttgcaatggcagtttcattaatttttttaattttcttttttattttattcatctctgctttgtctgtcttaatttatttgttcttttggctttgcatttaatttgcttttatttttctactttcttaaggtagaaacctagattcttgatattctttactagtgtaagcattttagtgctataaatttccctctgagccctgctttagctgcatcccatgtattttgttttattcaattaaaatatattttccacattgccttatgacttccttttacctgtgttctttagactttaatttgttaatttcatatacttggcaatattccagatatcttttttgtattcattactagtttaattttgtgtggttaaaaaggaaataaataataaataaaccaatagtaataataataattttgtgttgttagataacacactttgtattatttaaattctgttaaatttattgaggtttgttttattgcccagaatactgtctgttttagtgactgttttgtttgtatttgaaaataatatgtatttttactgttgtttcatatgaggcttcataatgttaattaggtcaggttggttgatagtgttgttcaggtcttctatatcagtgtctactttattgattagtgagagaggagtgatgaagtctccaactgtaatcatagatttttcccttttttctttcagttttatcattttttgctttatgtattttgaagatctgttgttaagtacatacacatttaggattgttatgtgttcctgataaatgacctcttcatcattatgtaatattcttctttatttctggtaatggtgttgcagaactttgctccttagttcagctaaaaccaggttcttgtcacatgatcaggaaaagttaggcacacagacatattgaagggtaaagggaatgtggaatctattgggcaaaaaggaaaaaagaaaaaaaactctcagaaagcaagaggggttcctgctaacaggcccccatctcacagattgatttcaggccatacacaggaacggaagaggccaggctcctccccacctccacatgacacaagcttcccgtggcttcagccctttctcccagtgtgcaggcaggtcggagattccagggaccctctcccttatctgcctccaacatcaatcaatggcttttgctttatgggtgggtcttgctcattgatgagtcctgcctcagctgtaggagacctctgatagtccaggtctaggatcacttactgttcttctgcaggggttgaagtctttcattctttaacattttcctcagatacagtatgcccccagcatgacagtgtatgctacctctttcccagcaatttaaagcttttgttcttttaagggacaagtaattttgaagagctctctgcctttccattagtagcatctgctccctcctgtagaattgagggtagctttccctgtaccctagtcctgcccccactctttctctgtgagcacatagagaggtccttggaaaagagtggctgtgaacccctctgtgtctgcagttccagggattctattttctcatgctagtacatagttggccttcagcaatctattgaaaattttagctgaattcttcacatccaggcatcagaggccccatcttcctcccactggttcagttccctgctgggatcaagaaaagtaataattttacaaattatccagctctttttttttattgcatgagtgatattctctccagctttttatattcaaagaggaagccagaagtcctaataattcattttattacaaaagtatctatttatgaaggataggaaatttaatataaacaaaaactactgattgtttaagaagtgctagtctgtacctttatgaactgatttatattttcattctatgccacatcttggtcttattaggtccttgggtttgttacctggtagtaaggctggctttttgttgttagttctaaatttacatcttttgaaccaaaagttctagtatggcagaatttgctgactattcatgtattcacccttattatccccttttccttttaaaaaattttattgccaggcacagtggctcatgcctgtaatcccaacactttgggaggccaaggcaggcggatcagttgaggccaggagtttgagaacagcctgaccaacatggggaagctctgtctctattaaaaacacagaattagccaggcgtggtgccacacacatgtaatcccagctacttgggaggctgaagcaggagaatcacttgaacccgggaggcagaggttgcagtgagcctagatcacaccgctgtactccagcctgggcaacgagattgagactctgtctcaaaaaaaaaatgtattaagatgaaattcatattgaacatttagaagtgaacaattcagtgacatttagtacattcgcagggttgtgtgactgccctttctatctagttctaaacatttccattgttccaaagtcaagctcgtaacccacaaagcagtttctcccatttcccactcttccagcccttggggaataacaatctgcattttgtctccatggatttatctatttcttataaatattataaatatgattatgaagtttatatatttcttatagagtcttacaatatgtgactttttgtaaatgacttctttcacttagcataatgttttcaagattatccacatcatagcatgtatcagtatttcattccttttcatgactgaataatactcctttgtatggctatatcacattttgtttatccattcatcctttgatggacgtttgggtgtttccatcttttcactattgtgaatagtgccactatgaacatatttttattgcatctgtttttttaacttttattttagatgtgcaggttttttacataggtaaaccgcgttgttgtggggtttggtgtacagattgttacccaggtaataagcacaataccctatgggtattttttctgatcctcttcctcttcccaccctctaccattaagtaggccccattgttgttcccctcttagtgtttgcgaattctcattgtttagctcgcatttataagtgagaacctgcagtatttggctttctgttcgtgcattagtttgcttagcataatggcctccagctccatccatgttgctgcaaaggacataatctcatttgttttaatggctgcatagtatgctatggtataaatgtaccatatttgctttttccatttaggtcagttccatgtcttttgtttttttgtttgtttgttttgagacagggtctcactctgtcacccaagctgtactgcagtggcgcaatcatggttcactgcagcctcaaacacctgggctcaagctattctcccacctcagcctcctgtgtagctgggactataggtgtgcaccaccatgcctatctattttttaaaaattttttgtagagatagggtcctctgttgcccaggctggcctttaactcttgggttcaagcagtcctcccgccttggcctcccagattgctgggattagatgtgagccactggcctgaacatgtcctgcttgagtacctgttttccattctttagggtatatacctgggagtggaattgccgggtcatgtggtaattctacgtttaatgttttaaggaacctactatctcctttgactataatttttgtcatattgctctttgagtttgtcttcccagagggccctaacttttcattattgaagtaagacaggcaaggaagtcatctttctactagtttcatgtaggaacctttgtagcttctctaaagaggatgatttttttgggtctcctttaagactttcctagcaatttcataaccttcttggatggaagatacaacatggcaaaatgcagttgaggataaagaggttgtttttaacaataagagccctcttgaaaagtcatgagttttgcatgacaagaagtgcttccagttgccagtgggagagtttcctcatcatgcagagtggatgactcactgcccttgactgctcttctgatcccgggggcctctgttctctcacagtagatgcagcacacagagctgccaaggcatttccagcagggggttctgtgctcaggttttgaacaagggcagcatgatggagcctgacttactcatacacttcctgaggttgatgaacacattttcaccccttttagttgtggtaggtaatgtattcataaattcaagcctttttcccagattgtaatggatagtttatatctctctcatgattatttaattattcaagccaggatgactgtgtgttttctatcagagtttgggctgcctcagcaagatgcagactggtatctgcccttaggttaaaaattccggccagacatagtggctcacgcctgtaatcccagcactttgggaggctgaggcgggtggatcacgaggtcaggagttcaagaccagcctggccaagatgatgaaaccctgcctctactaaaaatacaaaagttagccaggtgtggtggtgggcgcctggaatcccagctacttgggaggctgaggcagagaattgcttgaacctgggaggtggaggttgcagtgaatggagatcatgccactgcactccagcctgggtgacagaatgagactctatctaaaaaaaaaaaaaaaattccacaccattcccttcttccaagtatggatggaatttcttccaggatctgccagcttttgtgtgtgtttgtgtgtgttgtgtttgtttgtgtgtgtttgttgaatgtctgtctaccactagaatgcaaggcccaagcagggaaggaccatggctcttctaccctctgcagactctccagggacggcactatgcttgggtgtgtggcctactccctatttgtcatcccagacctatgttttactcttctttcccttgctctgtgtcctggggtgataatgccttcaaccaccaggctccattgccctctggcttctggttgggtttggacaatgagggagaggtagggctacttcccctcccattgccacctgcaactttgtggttctggctgtgtccatccaggactatagcctttcatgccaggctgccctccctgcagctctgggtctccctgcagctctaggtctccctgcagctctgggtctccctgcagctctgggtctcaccgtgtgtcttggccacggctatctgctctgggtagctctggtgcttcagtgtccccggggttcctttgatcttgcccacacccctgtaaagaatttgttcttttaaaatcccaggtgaatatgccttctctttcttgccagggtcatgacaatgggctgaatttttgaatagatgagtggatggatgagaagacgaagggccgtgtttgtggctcaccccccatatggaacccccctctggctgccatctcactgggaggccttgccctgtctcatgtccctgctgcctttctcctgcactcccctttctcaatctgtcccaaccatactggctccattgctgtttctagaatgtacaaagcaagctcctgctccaggcctttgctctagccattctctctgcctgcaagtgtcttctctcagatatccacttggctaattaccttttctaggttttgctgaaatcttaccttttctatgagcctcacccaaaccactgtatttaataatggaaactgccctccaccaatatcaccttggcagccaagggcctccttcatcttggtctgtgtttcttttttccagaacacttaccacgttttaagaaactgcatttgacttatatatttattgacataaatattatgcttaatatttatcatctgtctctacctgctagaatttaaactccaaaaggcaggatttcgttaccgtttttttccatgggtatattccagactcccagagcaatgccatcttcacaataagtgcctgtgataggttgaagagtgccttccaccccagaagatatggtcccctggaacctgtgaatgtgggcttatttggggggtgggggggaagagtctttacacatgtaattaagttaagaagtccaaaatgaaatcttcctatattagtgtaagccctcgattctaggaaaagttcttttaatagaagagacagggaaacagacacagagacacaggggagaaggccaggagaagacaggcagagactggagttatgtagccccaagccaagacatgcctgaagccaccagcaactggaagcggcaaggatggattctcccctagagcctttggagggagtgtggccctgcagacttcttgatttcagaaacctggcctccggaactgggaaggaataaatttgtgctgttttgttttgtttttttgagatagtcttgctctgttgcccaggctggagtgcagcggcatgatcttggctcactgcaacctctgcctccccagttcaagcaattctcctgtctcagcctcctgagtagctgggactacaggcgcatgccaccatgcccggctaatttttgtatttttagtagagacagggttctgccatgttggccaggctggtctcaaactcctgacctcaggtaatccacccacctcagcctcccaaagtgctgggattataggcatgagccaccaggtccagccaagtttgtgctgttttaagccatcaagtttgtggtcatttgttatagcagccccaggaaactattagtatagtgcccaataagcatgtgccgaatgagtccacgcaagccttgttaacactgatatgacctccatttgaaataattcttctgcttttaatagctaccaatgcctgttagtaaatgtgagtacgtctgacatttaagcagtgttccagtttggggtatggtatggtccatttttgcagtagaaacttaaacttcctgaaaattttcacccactatgcttaacagcttaaagtctaacctaacccccaaataattgctttcactgtaaacctatcaatagcgtatggagaatgaactcacaaattattggttcttcaggcagtggatgggaacccctgttggtctttagccatgaaatatccctgtatcatttccccatttttatcctgagtccctcctgctgtatttaagctaattctcagtgattgtgtctttggaggagtccgtcacaagcatctatgtgatcaccctttgtatacctgacaggggttattttttctcccccaggcccagtcctggtgcgtgctgggcttgtgatgcagtgtggtactaactatctgctccttgtaggagacggaaggtaaatcaaattgaaaacacccttcctgtgtagtgcgtcttccaaatgtcctcaggtctctattacatcttctggaggctgccagattctctgcgggacaagaggaagctggagcagcttctctgtagcgacagaaggtgccattagcagaaatacatcatctcccagtggtgctagcaatagcagagtcctgatcatgtccattcttttgccagactgaggagagagtcctcagaggcaggggctgctggtaacagcgcctccatcattctaaaatattccccctggagtcccagagcagctatttctgcccagacgcaacgagagcttcacagagcttatttcaggcattgatctttcacaaaagcctccctgcttcctagattccaggccttctctagaaggggtgggggaggtagaggcctgcacatggctgatcagttgctctggctggggctggatcacttcttccaggtgttgctcattagatctcttttcaagggaaatctattagcctggagcagtggttctaaaactgcagcttgcagggcttggtaaaacaaatttctgggcctcacccctaaagtttgggatttagtaagtctggggtagggcctgagaatttgcatttctcacaagttcccaggtgatgctgaggctgctgacctagggaccacatttcagaaccagcggcttagatgcagagagacgatgttcttgtgttctctcctacttagtcttggcctcagtcctcctacttaaggcagtctgggccttttgaggttgggccaggccctgtctcaccctgtttctggaatgcagtgaaaacagctcttgattctgtgcagcccatctgtgctagttacctctgtctcccaggagaagagagcaatgaaccttcttcctccatggctctgtttccgctgtctctgttaacactgtttcctcccccttggtcctttagccctcacagcttcccccttttgctggtctctggatgcctcaacatacctgtgtggctcctctgaccctgtcctttaaatagacctttctttttattttattttacttttttgtgaaactttaagttctgggatacatgtgcagaatgtgcatgtttgttacataggtgtaaacgtgccatggtggtttgctgcacccatcaacccatcatctaagttttcaaccagcattcaagaccatttgtgttgaattctggttcctgctggtaccatgtcctgggatatttcttcccttaggggcaaagagttttctagacagactgagtcagaatcacttagtctttatctcaagagcagccttgtcacccacagtagaaggcagaattactgtggagtctaacagaaattagggaagtaagaaatttataccaaatggaaatatggaagatttatctcacttatttcaagcttggggaaatactagcctttaaatgtctgattactagagcctgggaataaagagggactgcttaacctagggaagtggtctttggtaattgggtctctgatccaattgatcggcgaacaaatctgtcatcatagagtcactggggcagctaccctcggcccaactctgctgtaggtgcctccatgacctgactagatgtagttgtgaatggagctgggattgtggagggacttcatatgtacattacgcatgtgtggaaaggtaaaataaccatcagtcttccaattagaaagccagaaagctacctgggacataatcaatgagggcaggcagattcacattccatttgggtgtgcaagggtatgtgtgtatatacgtgcaaagataaacacccctacacacatcattaaagaaaagaatggaaggaaaatcacccagatgttaatcatgtttttctctggttattgcaattacagatgatttttgtttcctatttttctgtgttttctgtttttattcaatgaaatatttttattcttccaaaaatatgttaagtgtggcataggaaatagagctcagtgccctgccctctgctcagcacctatccaaatcctattaacataccacatagttcaggttctgcctcctccaagaagactttcctgaccagcctcttgctgctaaattttggaaatacttttgctgagtgattgttcctacattgagtatatttgtcttatttcttcaagtgcactgtgacttatgcaaagatactttttctgttttccatttcccacaaggccaaatacagctgaactcattgtagatacttgttctacaatgggcagcgaatttctgaaaggatagaaaagatgtgaaaatgtgaaaaacagaccaaaatgccatttctcctcactcacatgccccacagtcatatctcaacttggttgtagctctccctcgctgagaggtcatgacctccagcttaatgtcagtgctgtagggccttagagcacatctcctggataacagtgtgcctgcgcatgggctgtgtatttctcccctccttccaaagtggtgagcactttgcatcaagcgcaagaaagatgtttgatgaccttaatagcattagtgacaaggcctccatccttgttgggcacttttggtctgctggtaaaagaaatgttcactctatccccaagagaaatcttcttttccaggaatatacagcaaaatcaatcaagtcttccccctattgaaggctagctactccacccatgtgatagatgccatcaattttttcgtcctctggggaaacagagtcattttttccttctttatcttgcatagtcagtgctcccttacaacacagtaattcccatcaggttttgagaactctgtcttctccctttaagcaaccaccctaccagaagccctcttcagttctttctctttttgctttagtgtcaaattttcaaaagacctgtctattcctgtactccccattttgttaccttcaacttattcagcgattcagtgcagtgtgtatcagcgcagaatttggctccactattctaccattagcttaattccctccatgttgctaaatccaatggacctctcagtgcatatcttatttggctttttgctagtactataaacctttgttcacctcttctttttcgaagcacagtctttccttggctttagtgacctatgtggcttttgaccacctccctggccactcttacatcaccatctctgtacaggctcatctacatttacccagctgatcaatgttgaaacaccttgggactcagcccaaggacctctcttcgtctcgggctgtactttctttcttggaggcctcattcacatccaggttttcatgggacagccacagtttgaaagtactcagggatgtgtcctctgaccaccagagaaatatttgcctctgccttcttgacatgtctcagacgcctcaaaggtccctcttgttcttcctgtgcatggccagtcctccttcaaggacctctgagatctcagcaaatggcactgtcacccctacaggtatgcaagtcagaagcttgagttggccgatctgttccacattctacctgccacactgcctcagcatttctcaaagccatccactcttgttctttacttctgtcacccaaattcaaaccatatcatgttcatggctttcatttttaaaattctggactattatagtccccaaactagtcttacttccatcagcttttgaccccttgcagtctactctgcttccttgaacagatctttgcaaaatacagacaaatcaggtcatcctcctgcttcaaaccttgcactggcttagtcttgcttttagggtgacagggtttggctgtggccccacccaaatctcaacttgaattgtatctctcagaattcccacatgttatgggagggacccacggggaggtaattgaatgatggggccccgtctttcccatgctcttctcgtgatagtgaataagcctcatgagatctgatggttttatcaggggtttccacttttgcttcctcctcattttctcttgccgctgccatgtaagaagtgccctttgcctcccaccatgattctgaggcctccccagccatgtggaactgtaagtcgaattaaatctctttttcttcccagtctcaggtatgtctttatcagcagcatcaaaatggactaatacatagggtaaagagtgtattcactaccatagcctgcaccaccatgcttcacctcatcccactgcctacagcccagctccatcttataccatcagcatccctgtccctaccccctactcatctactttttagtccctctgaagtgtcattctccatccacaacgggcctttgttcattttgtttttttttctctgcatgccacatctgaaatcccttctctcagtaacctaaatcaactttgtccttctcatcctccagttcttagcttgttatcacttcccctgggcagccttcctccaagaccagaccagatcctgctattttatggatcctcaaagcagcctgtacctctccttcctagcccttgtcacctttgtgatttaacatgtctttatgtgttattttgcttctctgcttccttaaataagctcctcaggacagggaccgtatcttttttgctcatcattgatatccttagcacccagcataatgcttggacgaagtccgtactcaatacccatctactgaatggaaaagactttggcagaagaaaatgaagtcaaccacttgctcctcagacctgggtcgagcaagccaccacacctaaatgttcaagttagaatcaagaaagttcatttgaaagtcatgattcaggtttccagcataaattatatgcagttgtgcaaacatgtcaaagtttagtaaattgaatttgtttaatgtaaacaacttttgaccaaaataataacacagctttagaaaaagacattaggcacccacttttgaagagtttgtataatttaacacacaagaaaactttactgtaattatatgcagacgtatacaaaggataaatgttatttacttgctccaccctccataaaataaacctccaaccatgcttcagcttgctgcattaatcctaatttagaaatcacccccgccgaaatgggggtgggggggggcgcatggtgggctctcatcttttcttcgcgtcaaaattagccgtttaaattagaaccacgttgggagcgtaggtgacgccaacgttgcggcaccagtccggggagcacttaaaagtagccacctgaagttaattaaaaccttacctgtcaaacccagtatggctacatttgaaaatctttaatgtaattaagagaagcacattatgggaggtcaagtgactttctttttgaattccacttctaatctgtcgtcaaatggatggaaattgccggccgagggagttaatgaaagctgcatgagcgagcaagggagcaggaggaggggctggcagcctggaggagctggcgggagggcggacggggacccctgtctccttctagcggcgaggaatgagcctgggggagccccaccgggcaacttcccttctgccaggaggctctgggtggggggttcattcagcccctctccctgagcacactgggggcatgcaggagcagggtatggggcgtctgcgcagctccctgcttatcgctaagtgagatctgtggccaggacggcggggcctggacagagtggagccggcgccggccctcgtcacccttcactcagagccgcctgattagcatcagggttccgctcgcctcttgcacggatcccccaaagagccggtggggaggggggcgcttccacgcggagcctcagctgtgcagcgcctgaccccaagcccgtcagggggaaggtctcccaggtccgcagccttcagcaccctggatctggggaagccccaagaggccctggtactgccctggattttcttctgggcatgtgggcttctgggccactaaacccatctcctactgcactaggtaggtccggctcccggagcccccagtgcaatcttaatgccagaacgctgccttttggagattaaatcacttaatgctttgctgtgtgttctagcctgagggtgctgttgacagaaggcagagtttttctctctggttgctgcttctctctctcttttttctttttgcattgcgtttgtctgtatcagcagaggtatctgtgtttgaaaaaggattaactccctcagaatgttgccacttaagttttgcccctgccttggaaactgacatgagaataaacaacatattaagtcttcacagaacactggtaccaagaagtttccaaaccagaggacttaacctccttaatccaggccttttccctttgacttcctcctgttagtccgagcatgggcagaaggcatcagtggggagaggagtgtaaatcttctagtttggaaatctcttccatactccatggaaaacattgggtgtctcctgtggggccagtgtggtgagttacttggaacagaatgggcaatctagtaggcgttgaaatattcagaagcatctcatagtgtcttagaagatccaagacctagcccgatgggtcttctctgttattagaattgtgtggaagggtggcagacgcagttgaggggatgggatgctgagagacaaggcatttattaaaacgacctctagagacttttttttttccactgggcttgaatttcttgggcttggagagttgtcactaccccatatgaaaaatggaagagatgagtgagaggaaagaagatgaggggggaaaaaaccaacctgagagtggtttaaaatcagaacagagtgttggtgagagtcagtttccaagggtcgcctcttcatgctgtattgctttttcttgaccaatgaaaagccccctttttcagatttccccccatttctcatccatagcagaaagggcagtgcttctagaaattgagatgtgtctccaggtaaaagccacacaaggcagtgggaagggatgtggctgtccccagcctccatttgatgccgcgtttctctcccagccacaagttcacaggtaaaagtgaaaagttgctctggacgtcccttccaaagagagctgtctgctcgccatggcaaccttttcctggggtctctggctgtcaagaacggggtgcaaagttcacagagctcagcattgtgccctcctctcttcttgtcccttttttcctgaagggatcgaggttggtttgcagcacagtttaaagcgaagatgccaaatgaaaagttcctcgttttaagttggtgcttatacaaagctgctttgtggtttttttcggcctgtcagacttgtcaggcctagtaagaaaaagtatattgtttccagcacttggattcctttctccctgacatctgccactctgtaaagatgataaattcctgcctcattagccaagggtgtgggattacaggctgacaacacattaatcaccagcctctgtggcaggctgactagcaataggcattgttaacaaaacttttctaatatgtcactcttctctatgacagcctgtaatcaatcattgtgattgacggcgctgatagattacactatttatactttgtgtaatgaaagatagtgtttccacctactgtcatttctgggctagtggtagaggatcagtaaatggaaacaaacataacaacagggcaagccctcattcaccccaaaatatccatagaactaccccaccttcccaagtcctaggcttggcttccacttttggaagtgaaaaagggcccatcctggaactctggcaatcattctgggatgaggggtagtggtgggggcacctggaaggacagaggtaatttggattttcacagagagagctctttgcaaaggatacgatcccaggtattgataggtcgagtttacataggtaggagagtccccaagcagcccctttccttcccctcatcagcttacgtgtgtgcagctgagcgttgagtgcctcctcccctgccagatgagagatgatttagatgttgataaaatatttgttctttcctggctctgagggcaaatattatctttgtttcccataatcgtaaggcgctgcaaaagtcaacagcacccagagcaagtacaaaaccaacactcggagagaagccctttctggaggcctttgccagggcttgcttgtcccccctgaagctcagaaaatttcaaacaggatacgaatgaatcagctgagctgaaatgtgttctgactctcacatcctcggtatttttggagggtcctttcagtcatttttattttggtctggaaagcattcgtaaaggatacaagctgtttttgctttgctggaagttattatttcaatagagtgacaaggaggctcctgggctagcatcctaagaggggagcatctttcctcgtgttggggccatttccaggcaatttggccacaagtgcctgttttaatgaatcactttaaaaatgattgtggtatttaattttccttactattgattaaacacaagaaaatactcctttattacttctttaaggtggttagggagattgctcataggtatataaatcttcatttgactcttcagtacaagcacagatgtgcgattccctgccttcccattcaatgcatttttgatctttgcgtctctgcattatatgtggattggcgaggccaagagaggagagtagtaaggaagcagagtcgtcgtcctcctcctgaacgctgtggtgttgataggcatcagacactttaggtcaccctgccagttggcaaagcaaaaggaacctgagacctacccctagtgaaattgccttagaggcggatgagatgggaggaggtgcagggagacagggagctaaactttaatctctctgtgaagtttgagtgagcccaggatgattaatgagagagcagaccatctgattaagcccctctgtgtcatagaacatgattagtaggtgacagagatggtaacagtatccagccaaacccttgtttctttcacagctccggctgttatatgattaatgtccccaagggctatcttggggtcaggcaggggaacctgtcagaacaggtggaagtgacaaaatgggcagaaactcctaagggggactggagtggtgagggagaaaatggagggggcagggcagccagatggagccggcgacctttctctgatccaagcaggcacagagatcatcgtgggaatggaaacgaggaagaatcacaaaactgcagatgtttcccaggtcctcaatgcatcaagtactgccagctcagacttgtgggaagcacagtgtgacacggcgcgttatcactcgtggtttatgttctgagatggaatgggatggggccactgcaggccctgtgggtatgaatgtgggatgcccgcacctgtgcctgtgtaagcatgagtgtttgtgcaggtacactaggacaagtgctccactctgctgggggattaagtatgtatcaaacgggtagagctgatatttcaatttactgctttctggggccaacacctatacattgtcttgactgtgctacttagaaaagataatatgggaaaataacatggatttacagaattgaaagttttaattctgtaaatttacagaatcaaaaggtttttagatttaaagtgaactgtagaaatccctaattcagataatccagattacaggtgagaaatctgaggttcagagaaggtaatgacttgcccagtggaagtcaagactagaaccccaggcttcctatttccggtttcatatactaaacccttgatgagtctgttggtaggaagcctcagaccttttcattagatgtgagtttcccagcaagacttgagtctttactctccttatcatattccctctttcccttcctagaagcactttgacctcccggtcaaaggtttaaacctcagttgaaatggagtctcattaagtccttttgggcaagcagccttcccagatgtcaactttgagaggagactatgctctcaaggcagccgttttgattgacaggagtcctgagggtagccatttttacattaaagggaaactggtttgtattgagtttcatctggtgagcctggcttctcttcttccacctttgatgccctatgtgtctgttacatacattcaagagtcattcccgggctctaatggggtctgggagaactttcatctcagccattttccagggctctcttgggtaaccagtttccctttgttattcacgtctatccaataactcttgctcttatgttcacacaataataataataactgggttagaacctgggctgggcagtgaccagccccctacatctgcttgatctctaatgcaggagtttacaaattggaaatctttgctagctaggaaaaagatcaccttgcagtaggattttatccataccaacagtgctcgtgcttcagtgagttgcaactgtggacttaatggcaaagctgcactcagtgttatgatcacgaaggagggagaaggaagaatggagattgtattggattttactaaattgtgtcagtgagggagtaagttgaataagagacccaaccagggcatattcataactctgtctcctgacagtggttgattatgtacaattttgatgttgattatctttaaatagctcttcttgttgtgggacaaactgggagatctacctcacatgagggtaaagtacaaaggatactaaaatcttcccagagtagagtccccatgattctgtagcataggctttgggggatcaattatggataaataaatgttcattagcttcagagctctagtatatgatttttgtcatgggtttcacctcagcatcatacagcctttccaggccaagaagagaatgacctagtgctccaaaaacagtcacttaaagactggctctgtggccttcgagtgagttatataaaatacaaccaagatgagactgagtgctttccatggtcaaagggaatcatctaggaccaaacttttctgtgagctgatagaaaaatttgagcaaactttggcagactgatccaagaagatacttagcctttactgtagtattcaggatattgtcagacattctggtgtagtgtggtggtggtgaagtggtgatatgttttagtacagagttcattggttgctttggaggatcatgaagtgcttgtgcctttcccctattgctatataggctgagatgccaaaaattcaggctttcataacccacaataaaacctcatcttttccaagatgttgacccattccctctgtgcacactgctttatggtagagacttcctggtagagccatgctgttgtggaggtgactcccagctttgcttttagtaggccctaaggatactttggggtgtcaccatgactcactggtaaaatttgggaatcattttatgagagaggccacaagcaaatggtgactaatgatacagtactgaagtttgtgaatgatgtacattcatgtaaattagaccagattcactttggctgccttcctctgtaatttcttgagcagagagagaggagtggagttaattaacttagggagaatcacatctcaccttaagggagcccttgggagtgggttgggctctataaaatcatcctccaagcacttgggcagagacatgtttgagaacttctatattaagatatagtgtgctaatgttattacccaatcagagtgtgtgacaaatagtttaatgaagaacagcaaatgttctgggtagcaggtattcctttacttaaaggcgaagatgagctatatttaaaattcaggaaatgcaaacttaggtccatttgaggctaatacatacacaagattctgccttttcatgacagaggaaaacataagaaaaatgtagagtgcaggagacattcatttatcttggaggagaagaccattctgtggccccatcagcctggactcccaagcccagggtaccaagccctcttattcccttttgcattaaaaacatcacaatcatatcttttttatcctgttatttatttttgagactctgaaaatggatttcttttgtgggtggttgtttaaagaaaccagcacagaaaaatcagcctgtgcaaatacactttttttttttttttttttttttttgagcagtgattttctttttgtagttcggaacttgaggcgaatgaaggtctccctggtgccctggtagctgcagcccctcttttagcattttttcaaagggcgcaggccaatctgcccataatgagcttggaaagtgaggatgaagttcctgataatatgacacaaatttctttacttttgctccttattttatcttaattagtccctgtagaaaggattgatttttgagaggcttgtagtgaacatctgttggtattcctggggtcattcttagcctgtcctgtgtttgacatttcttgtaaaagaggaggcatttgttcatattgacattagctgcctctgtatctctcggtggtacagatggtctgtgaataaagacatcaagctaataggcaagatgacaagcttcaatggagccaaggctcctcacacttaaatggcagggcagcatagattgcttctgctgctgaggctggggtctgtgggtagcaaagcgtatggaataagttaaaaatgaagagggaacctggaaaatgactagaaatctctccctgaaactgcaggggctttttattactgttttcattattattactggtccatatagtatgtcaagcttccaagatgtccagggtcagggagagaaagtgaaaactgggttttctgcccatcctgtgaccatacatttctgtcaaatgggcatgctaatctcagaagggagctattgttctcactttctggggaagtacattcatgttcctccttccatcagaggacagtcactcttaagtctagaggctgattccccccaaacccatgaaaccatgttttcccaagggacttccaggaaagcagcactctggaactttgtaattctgtacattcctgaggttctgggctttctccaaaatgcatgtcccagtttggtataataattcgtcatggctttggcatgatgaatctcaatttatgtccatttatattttaatcatgaaccagctattaagacaaagaggtttttcagttgattcttaccaatgtgaaatgccatatcttatgttacctagttcaagtctgaaggggagcctcccagttctggtgttgggtggataagccccccatttgttagggtctttttatcagtttctgttgtattcttgcagcttctatcttcccagatgctggaatcctcatatagagcagccccctttgactcaattacctgtatagcttttcttaccttctcctggactctctttgtatctactatacattctttattttccatttgtacattggtgacatgtctacaggtatgtgttgatttttttttttttttttgagacagagtctcactctgtcacccaggctggagtacagtggcgcaatcttggcttactgtaacctctgcctcccgggttcaagtgattctcccacctcagcctcctgagtagctgggactacaggtttgtgccaccacaccgggataatttttgtattttagcggagacaggattttgccatgttgggcaggctggtctcgaactcctgacctcaggtgatccacctaccttgacctcccaaagtgctgggattacaggcgtgagtcaccatgcctggccaagtatgtgttgatttttaattttcatactgcgccatgtttcatggatggtttgaggtagcttataagaataaaaactataaaacaacaacaaaaataggatcttaccagtatattggaaaatatttaaaaatgggatgatagcataagaaatgctgtttgatgatagaaagaccaaaacagtatgtgctgatcctcttaggttggtgcagattaggattattttgagcttgtacataccaaggacttgaatcaagaccaatagctttatgtgagtgaggtaaaattagctctggaactgggtaggtagataaaaacaatttgtttcttggttgattgttctttttttttttttttttccaaagagacggagtctcgctgtgtcatccaggctggagtgcagtggcgtgatcttggctcactgcaagctctgactcccaggttgacgccattctcctgcctcagtctcccgagtagctgggactacaggtgcccgccaccacgcctggctaatttttgtatttttagtggagatggggtttcaccggattgctttttctttatcttagacattagttgatattgaaatgtttgtatgtgttcctcacaccacccgcacgtaggatctcaatttgccagctctaggaaatgggagagacctatctaataggtatctagtatcttcaagaaggaggaggagctatggaggagaaggtgatagggagagaacaggggtgagtagaaagaaagaggaaggagaggagaaaggagtcctctaattcgcctagataatggtaatattaatgagatactctagttaatgaggcaattgtctggcagagggcgttgttcagtatttccagcccatttctgtgggcttgaggcaccattatgagaagctgaatcagatgtttagaaggaggaaaaattgggcttccaaaaggctgaggccagaaaacagtcaatccacaattgtctgtcatctgtttgatgcagatcagatggggacatggccctgccttggtttctccattgggactgagttctggcttcatatttcaactctcctgacacctgagagggttgtcatgaaatgagaggaaacttctccccttaatgtcattctcccatgccaacttggttttttgcttcttagtcactgtttctgttttccccagtacggtgaattcccccaggatggggaccagatatccagtattagattcagtcctcctccatgtggagtcaacatctttttgtcagactgggagctccctaaagacaggaatcaatgtattttatatcattttaggagcttctcaaagaaagcaattattcctctcctcctttctcctctaaattctatggttcccattggggatcatgcattactttattccacaaacatttataaagacctggtatgtgccaggtactgttctaggcactggagatacagatagactgagttcctgtccgaggagcttgcattttggggtggaagtggtaagagagacagataataagtagataaataaatatgtgtcaagcaggaggtcatgctgtgacatgtaggatgatcagagatggactttcagagaaggtgacatctcatgctaagtgatatacaattatttgggcaggtagatgagagttccaggcagagggaacagcaaatgcatcttctgtcatctctagtatctccaagggagtgtgagagaccaggagcagcatcccaggaggcccagggtcacctgatcaccttaagtctcagaatcagatgctcagacatctgctgcggcagattgtctcctgcttgggctgtgtccagtctcggtgccagcagcccttttaaacccatcggcaccttcaggtgttttccttcccctgcctgtctgtgaggtcttttaagactttggaactgggcaatctaggtacaaatcttgtccctgccacatgatggtcgtgtgacattagggaagtcacttaacttctttgtgtctctgtatatccttatctgtaaaatggagatgataattgtctctagttctctctagagattaaatgagttcatatatgaaaatgcttagaataaacctgcatataataaatgctatacaaatgttagccactattattgttgctgttgctgttaacttgttttagcaaatgaagcatctctcttacaatgcaaagccggcctctttcccagttcatcctcctacttacctacaaaatgagggatggagatgaacatgaacatgaactctaaggatttttttgttaggcttgcctttctgggttctactctaagccacattcagctcaccccaactctaaggctgcaaagctgattcggcatttagtagaccattttcctgctcatggtccatggagattagccttttctctttagctctaagttccttcagggcagggatgaaggttccacctctgttatgtctcctggatcatctaggatgatccgaaggattcccagatctgggcattttattctgtgcttattagggatttcagaaaaatgtgctctcctcatgtttggcatgcaatcttttcaacagtacaactcttcattctccatgctatcctctggtggaggcagcatagggcgctggctaacagacctcagacttgggatccacgtggtttgggattgaattctactgggtcagtgactttggggatattaatgatccctccttattaagaaggttaacaaggcaaggcacagtggctcatacctataatcctagtactttgggaggccaaggcagtcagattgagcccaggagtttgagaccaccctgggtaatatgactaaactttatttctaccaaaaaaaaaaaaaaaaattagccaggtatggcggctcacacctgcggtcccagctacttgggagactaaggtgggaggatcacctgagcctgggaggtcgaggctgcagtgagctgtgattgtgccactgcactccagcctgggcaacacagtgagaccgtgtctcagaacacaaaaacaaaaacaaaacaagtcaatatatgtaaaacacagaaaggtgctgatgagtggtctacaaatggaaaccattgatactgttattgttgttagtgttcttccagtgtgctttatacataaaaggttctaaactgtaggttaggatagtccttctctgaatatatataatctgtgaaggaattctttcactcagaggtggatgtgaggcagcattctgcagcatctcagaaactggtgctcattaaggcacaggatcctggctgaggccagtggcaaagcttgcttaaagatactttgtcatctttccgtgtatctcaaactctgtgccatgttaggggatgcggcaaatatttgcagaatgaattaataactggttgaaggatggatgggtgaaagatgagcctcttctgtcttattattactattaccaaagaggcaacagtgctttagcttgttccttcccctccctgatcttttctctcccactccaccttttgaaacttttgttaatcttgctttcttctaccttgtctcatttccgccttgctttcctctctcctctgccacctctcccatcgtctctaggcccaaccatgactctctgtgtctactatttgtcgcttctgccatcggtatcaagtactaagtatccctcaaatccagagtattcacagtgcagtgacccagatgaaagggggttgggattttgctttcttcccttggtaactatttctcaggatgacccagaattcatttgcttaggtaacaagacaacgaggtccccctccttcactttgacaccatctgtgtcagtgttttgataacagtccttgccaagtgtatcatggctgaaattgatgctaccaggacacaggaaactcacaccttttctcaggctgcctttctttcctctacacttactgctgtttaaatgtcaccactcttgaacaaacagtggagtaatgtgtcagggacagctaatgctatattttggtatgttcttatcaaatcaaaatgcctctggcaagctatttgcctttgataaaaagaatcctggtcttcctggcagaactcaatagtaattgaaccaggccacacccttaggacttaggcccctgtgggtgtcctgaatccagccccttggccacacagtagggtttgggtcaatgcccttagcattaacaaggctcagtagtctgaattcttttcagatattgactgctccccacgtctctgagaaggactcgcttttggggcctcagtttcaccatttggacagtgaacttccatgctttgccagccgattccttaaataatctcaccaaccatctgcagataattgctttgtgggtagcttatgaacagcagctgggagctgcccagtccccatcatttttgtctcaaaagcagggtttgggggccatactgtcagtagagaaatgtgtgctataatcattattacttatgacatttctacttaactaagaaggcatttccaggaaatatcttttaaatcagtaactttaagaagctgacgctcaaaggggatttagaatctggattatttttctgattcaaattatcttttcttttggcctttgaagaagcaaatagatatttatttctcttgttccctcctctgcaaatgcttaattgattttattcctgtcagctgactgcaatagaaatcgctgtttccacttcttcctgttaacaccttttctgcaggggtggagggctagggggaagctgggacaggtgaatgtcttcttgcgttcggctgtgttgtgcatggagaagatttggagaattttcattcttccaaaattatccacaacactttgaaatgaggtgacctcctgttcggcaaaatgttgatatgatagtatttatgaggacagtttgctatgtttacagaatgtatatttggaagttgcatgtactaattggattttgaatatttttgtttctcattgtatcacacctgaaatgatgaaaggtcatttaataaaaaaaattgaaccattgatgcctgagtggctgcccagagtaaaattgcctaccatctgtcaaggcaggaaaccagagtacagtgaaggtagggggagaggctcccaaaaggtggggtctgtcacctagaggaggagggcgtgatggctggaaggggtagtctgggtttctggtgactgtgtcccacatcaggactgcatgcagctggagggacagagcttcaagcaagccatcccaagatgactgtctcgacctcctcagtttctgtgaagaggacatcactgtctactcacagagcataaacccagaatgttttgtctgtcctactcctgtagacaattcctcccctcaccagtggtgaaagagccaatacaaagtcctgactatatgttctgacttttcctagggggcttaaggaaaggcaggggagtaataagcctctgctttgagaagccacctccttttcccctttgttcttggatagctatggaatgcaattatgtgcatttaggacctttcattgggctttgacattcaaaccacacacatgcccttgcaggttgaagagagaggggatatcctgactaacacattcccggactgcctcagagatggagcttcatgagaaaagcctgctctaggacttgtgtggcctcgagagcattgaggttgttcatgatggagctggcttttccagttgcctctgaacctaggatctgctttctctctccttcccacatcatagattgaatactactctaatgtaatgactttggctttttgtttgtttgtttttattcacaattgcagatagcgcataggcattctgcatatatcaatcttagggttctgtttgttttttcatgaaaacattgctttgttcagtgccctgtggtataacctgtggctgcaggaattatagaactgctggtaggattctttcagatagcaaggagaatattgcaatgaaatatagagaagaaagagtccgctcctgctggggtctttcatccagccaattgtttcccctctctccactgcctttctcctctctacatctgggcttctgtttctttttgtgtttctccacttctgtacccacactatcctttttccatcttgcaatacattttgttctttttgttgctccatgtaaggggcctcatggattgctgaccagcctattgcaggggttgcatttagctcaggctttcctctgagccatttagctgtgggcagaattgtggagttgcatgttaaaaaccacaagagagctgtggttatgacaggctctctgcatggaataagaaaagaacaatcttgggcaaaaggctctcagcattcttcctgatagcactgccaaccaaaaaccaccctaagcagattgtgctgaaggttggccacttctcagtccagatacctggctgaatgtttccctgaaattgagcctggggagcagattttgacttttcaggctacttgctcataaagccaaccatgtggatacaaaattgctcacataggaaatgccaagtggatgttcactgttgcagccattatgagcgctgacattgttgaggggacatcaggatcctgtatgcctgcctagccactgtggcttgtgcaagtagaaataaggtcattttttaattcatagcagagttgccagatgatcttaataagtatgttgtctcattatttaaataccatctcaaaaaatgcatatatgtgcgcaaatatttatacacatgcatgcatgcatacatgcacacacacattcatagtagaagcactcttaaccaacttgcatttcagcaacttggcgtattcacccacgccagccatcttcctgcgaaatatactggctgcagcacatcaccctacagatgcatggcagggcacttctgttcccaccaggtgaactgtatgtttaccaagtcagctgagcctgttcccaaacctacttatgttagttgtgtttatattgtaataatgtggtttaattaaatgttataaaaccaatgaaatgaaagagtgcagagtttttttttttttcatgaaaactaaggtgaatgtttggcaagactcagtgtgttttagttttttgaatacactcaaccaagtgtagataaggcagttgtaaaagcttgggaggaaaaaaaaaatcataaaattctagaagaagtctgcactcagattgccttaggagacttttaaagttctagttcctctttaaagaaaacaaaacaggaaattttagagctacatagtaagaatggtttgtacaaagtagtccatgctaagctttagtcaacagatccatatgcaaaagaaaagacctaagcctatatggaaagagcagcaaattaatttgattcacatgatttaaatcaaaatgtttacatatgaatgtagcattttaaccaacttaaaaaaaaacaacaacaacaaactagccaactactggttcagatcacagtgtataaagtgcttctgctcactaatacttgcccataaaatcaaagtctggtagttttgtttagaggtgaaaggagagaattggcaaagaaattaattctccaataacttgcctggattccatttttcttttgccatggaattcaggttctagatggtaacaggaaaagcaggcatttccaggtcgggaaaagcgggttctagatggcaacaggagaagcagaaggtgtgtgtgtggaggaaaatgagggttttcagaccctgggacagctcccaagtccgccgcagtgttcctgctggatgcaagccatgggggcagcacagatgggaaaccctgagttggtgtggatgggaacaatgaagagcaggaggctgaagttctgtcaatgcttttcaggtcaagagtgggaggtggctcaggaatgtggcccctgacgtcagcccgtgcaactcttgtcaacaaagagagctcccagttggagaaattaaaagcaaactttgactgggaatgtgtgggaagtggtagctcagtgagtgaggccagatgccacatcagctcaaagtaaagccatgcacttggctttactgatggagatgatggatgtttatgatccccagtgtgaaaaatccttgcaatgagatccatccctgaactcctcttctcccatctgtgaagatgcccaaagactctagactggccttggagcagtccctgggcatagcatgccctagagtacaaggcgagggacctttttggttgacacaattccccactgtctagcccagagctcatcagggaggcaatcattaaagacgtgaaagcgttgagcaggatgtattctatctaaggcaaattcatgtgctagaggacctcctggctgtgttccaaggagcgtctaccttattctaacaattgtgagggatactcagtggagtccaattggagacttatctatcctaagtaaaataaaccctctgttgcacatatgaaagtgataaataatttaaatacaattttaaaatattggtgcttctcagcatctcccactcctcatggttctctctttgacacctccagagtcccctagaaagggtgactttattctcaagcatcattccagtgtgcttcctaaccaataccagcagtgccagggccatccaattgacaagtgaaccctgggctgctggcccacccattattgtcactcatctgtgggctgatacccccttcactttgctcaagctcccagcttggccattggtgctcctccatcctgcagtcctaccccttagcctgccacagcccttgacttttcaggcccaccttcagccaggcctcactctcctacttctggccaggctgttgcccaaattgccatctccagtgggtagaagactatttatagctcccactgcaaattggttcggagactgaacgctggtctcctgaaatagacctttagtgtggacagagctcatggcaaaccttcttgggtgtagggtactcagctctgtccccctctccctagaggatgtgcacatggctaatgctacaggagtgggggtgggttctaagaaatacccagaaccactgttcactcctaccctcaggtccttttgctaaaccaggcttgtttgtggatcttccttccctaggagtgggcctcttctcagtgtggggttccacagttctgctctttaccagtggggttctgtttctcacctttccccagcacccacacttgtatatacctacacacacaccccttccactgccatgccttccaatggtctgggaagtgttttagtgggaaatagtctaaagtagaagttcatagcaaggggtcttcaaccagactactgggattcaattcctagctcttctactctctggctttgctaccctgggtaaattacttaacctctctgatttcagtttcttcatatgtaaaatggggtaataaccatatttactttataaaggctattataaagaataaatgaggttttcttttgtattttgaggagtacctggcatgtagtaagcccttaataaatattaactattaatataatatctgaacaccagtcactgtggctgctcaaagtttttttttttttttggacacttcttgactactgtgaatcagtagatacaaaagatactgggtgcaggacgagttcccagcttcatacccaatctccacttagactcatccagaatattttcttacacctctagccgtaaatattcaaaaattgctacatatgttgctagcccatcaagttattagtaaggaaccccatttgggtaggctactagtgtggaacctcacctctgttactctcagttactctttgtgtttaaaatgtcttagaattctttgtatctttaaattttaattagggattgataacaggttctgataacttgtaaatggagactgatcatttgttagcctgtgttttgatacgtagactttaaaaaaaagaaaaacttcttcggtcagaagctgttgttctgtgaaactagaccagactgtgttttggcttgtgtgagaagggaaagcatattgtttgtaggtgaacagtttgcacgactattgtgataatctatcctgtctccctgccttctgtgtctacccagcttagcctatctttttttttatgagacgaagtttcactcttgttacccaggctggagtgcaaaggtgcgatctcagctcactgcaacctctgcctcctgggtttaagcgattctcctgcctcggccttccaagtagctgggattacaggtgcccaccaccatgcccagctaatgttttgtatttttttagtagagacggggtttcaccatgttggccaggcttgtcttaaactcttgacctcaggtgatccactcgcctcggcctcccaaagtgctggaattacaggtgtgagccaccatgcctggccccacctagcctattgtatacaatgcaagtggagtaatcttccaagggcatgattttgattatgtattttttcattccggaaagcagcgagggccaccccgttgcctaccaaaaatgcacatttatggtccatggcaacctgttgcaccttaatgggtgagagagctgctctttccactgcccccttcaccatcttggtgcttccgccgaattggctgactcctgcttgtcacaaatgctttttgccttcttctgtctctgcctttttagttcccacccacccactttcctattgtatccttgtctggaacagcataccacattcctgtgcattgttcaggactcaatgtaaagccacttctcccaggaatctttccctaattcctctcagccaaacagaatcacccctgaggtgccatagcccttcatcccccatcacgtgggtatcatataccatttctagtgtgaggtataaggatattttcaatggacatttttatgtttgaatcttgtatatacctgcaattatcactttaggaaatagtcttagaaatatttaagatctttgatgcatattgcaaaattgccttttaggcaatattattccatttattctctactgtctgtgtattggggcccattttcccatattctctataaccctgggtattattttcttgccaccttttgctattttgatggtttttttttttaaagaaaaacctttgttttaattcatattgcattgctctaatttctagtgagactgaacatttcaaaaatgtgcttattagccatgcacattctctctgaattgtccgttgacagggcacttgacactttatatcatagtagttttgtgaacttgtcagctaccaaggatctatacgacaaacagctatactgtcagcccagctactgtgcttagaacatgataggtatgtactaaacatttgttgaaaggttgagtgaatgaatatatatggctgatgatggttaatgttccttaagcatttaaaaatgtgtagactctaatttacctccagtacaacaattcaagatgcaaatcttgaatgcaccattcagtgtgatcatgacagtgcctttcacttagtaagtcttccacttgtgaggttggttaagaggagtgtgaggttagatttgcaaacataaaaacctctggggtagggaggtcttttggtcactctctatgatcctggaacatcacgtgctctttatttatacttctggacttcaccaaaatagaggtggtgattttggagcccaagaagcaggaaggcagggtgagagcagacctgtgcttgagagatgtctgcttttcagaggagatggtgtagtgacaacttcagggactgatgcctggctattaggatcgagtcttcttagatgtcagctcatttccttgtagaaaatgaaatctaatgaaagctggtttatctggtattccatcaagcagaacattttttattacatcatattcatacgaatgaccctaaggcacagcaagatgatgttcagggtcacattggagttaaaggtcttataaattatattgtcattcttttgaaaattggtgattgtggcagatgtggtaattttccattcaccagaatgcctgagttaccaaaagcaaagatttctgcagactgggaaagttttgtgggagcgtgtatgtttacatgtgtaggtgagcgcatgagtacgagtatcggagtacgagtatcggaggaacaatgagctggagtccactagagagtgaaacttacagagtcttgaccattcatcattctgattctcagatttcaccagctgacaagcaccttcttttttggcggggggggtcagagtttcgctctgttgaccaggttggagtgcagtggcactatcttggctcactgcaagctccgcctcccaggttcacgccattctcccgcctcagcctcctgagtagctgggactacaggcatccaccaccacgcccggcttttttttttttttttttttttttttttgtatttttagtagagacagggtttcaccgtgttagccaggatggtctcaatctcctgacctcgtgatccgcccgcctcagcctcccaaagtgctgggattacaagcgtgagccactgagcccggccaacaagcaccttctaagggtgacttcactttggaattgtttggttgaagcaagggaagtaaggaaaccaaaacctcttcaacgctatgctaagtgttacttaatctcatttcataaaggaaatatgaggctggattatatttatttcgtgtgtgtgtgtgtgtgtaaattttcttaagaaagcagtaagtggttttttccttgtatgcaggtagcacctgccaacctgacctgttgacagataattgcttgacagcctggcctttgatgttaagcgtcacttaggcagaaagaaagtttccctgcacctccctaccagtcctgggtggtcttgtctgctttccttccccagaaccttgcccaggaaacccatgaattcaggcccccgggtgcaggtagggtcagcaaacgccagaccactccccaatgtgtggagagcgaggaggggcctgcaaactctgcttaaaacaaacaagtgctaaattaaaaagaatgttaaatacagatcagctgcctggctcctgacagcagatttaattcttccctcctctcacctgatggagcttcgcctgcagggtttgcatcaattactcgacgacatgtggaaaatgattgatgagctgcctgcggcactgaagtacactttgtcaaccgctcatcatttatacatcttatctctgccagaacaaaagataggacaacctcacactgaagttggggatgggaaggggggagatgaggatgggggtgagggaggcaagtcaggcaaagttgttgggtgcccacagggacgagcttgggtggtgaggcccctgctgttgcctcagaactgtctggtcagtcagctctgccacaggccctggctttgccaaagctctttgactgtcctcacctcccccacccccaacaaagtccaggaacagagaactgcatgctgttttaattacagcataatctcagagagctttcgaggcactgcagccactctgcagctgaccctttgctttaatcaaccactcctaaggcagggtttgtaaccatccctgacaaagatgaatcacggcccgtggatccagtttctgagagaatttcggggggagctgcccaggcagcagcggctgttggggccagcttttgggaaattggggcatctgatgatggtgagacttggcggtgatattcatggttttatttcaagccatgttcccaaggccggaatgagacccaaatgtttttgttcagattgagatggaaggttggtggtgatgctgactccttgtttgttccccagctgtggccttaggactaagacccctcctaacatgggaacaaaaaatatcacctcgcatatggctgtcttctctttcctggggacactattatagccacaaatccaggtgatgacctaacaatcatttctaggcaataactgctgaaaatagctattttattatgagctgatctctattaattcactctctattaaaggcatcccatttattgatttttttttctttgaaagaaagggtactgacaaatataaagtcaagtgacctagttatataatttgagtgattgacccaacagattccttagtaattggtcagggggtggaaaggaattaagttagaaaacttcaaccttataatataataggatttccctccaataaaatttgatacattacttacaaattgctaaataataaataagaatgaaaaatgaacatacctactgaatgaattataaaagcaagtaatacaactatgaggcaaaatcatgccagaaaagaaatagctccacataagagaattatgaaatggaaaaaggactcaatacccaggagaatatttctgcggcctttgaaaatttaaaaacagtattttgaactcttccaccagtttagttggtattgttagaggaaaggttttacctatgctcaagaatttgtagatgagataacagtgacaggtaaataatcatcatgatatcaaatgtttttataaaaatttcatggagcatgaattatactatacagaaggaccctcttggaccagaagagaagggcagccactgaggatctcataatgcccacaaatgtgctagcgttggcagatcatccatagtgcgtctctgttctgaatgaaagaaagcccttgcaggcttgatgaactgcaaagggacagcaccaaatggaggcatgtggtccctttaaggtggaccttaagatttgatttcagatttaagtggtagtcctatgcaccacaatgaatggagttttacattttttgtgcttttgataacccttcaaggcttctatcttgggaaatggtcacctatttggtattcattttgaaaggtttgaaagctatttgtattattttcctaaaactgctgtaacaaagcacaaccaactaggtggtttaaacagcagaaatgtattgtcttacatttctggaggccagaagtctaaaatcaatgtgtctgcaagggttggttccttctgagcgctgtgagggagaatctattccattcctgtctcctagctcctgacagcctcaggtgctccttgacttgtagatggcatttttactctgtcttcaccttgtcttccctctatggatgtctgtccttgtgttcaaattttctttcttttttttttttttaaggacatcagtctcattggatttgggcccatcctaatgaccttatgttaaattgatcatctgcaaaggccctatttccaaataaggttacactcacacttacctggggttaggacttcaacatctttttgggagaacacaattcaacccataattgtattacccaagaactttaattcgagagattctaccttcagtgctttatcttgtagtttaaggcatagattgttatcttgaagcaggagtcgtgtcatgtctgatctaagagtgggcatatagtaactacttgataaatatttgttaaattaatgaatggatgagactttaatcttgaacttccttggaaaaggcatttttatatgacatttgtaccaggaaaatttactaatttacaatttatgaagtcaatgaactccagagggacacaaaagttttagcaaaaaaggctttctttcaaaaataatatgaagctcagagtgtggccatttatagggaatcttctttttgtgaatggcactttagagagaagaattccctagataattctgtttttgcagaagtcagtgccttgtgctggatttattttcttgccaatacattgtcacttggggaaaaaattccccatggaaactttatattataagtttgttaaaactggctcaatattgtttatattatctggttcacatgctgatatataagggagattcaatattatgagtaaactattacctaatatgtgcaaatgattgagtcttgagttagtaaggaggaaggttttgtgtcttccagaaacatatttacatacaagtgaacttttaaacatattaaaaaaaaagcaaaaatgactatatttgataaaaacttgtccaaaaaatgtagatatagcaagtttagagattaagatgtttatttgtataaaatagatgagcactttttgttcttaaactttctatatttatattttacataagtttttaaaatccgatacagtcaatatttgtttattaaaattatatgatggaccatataatataccaggctgaggaggaccaagcgtatcaataccccaaggaagcacgtccatgtgggtaatgttaaggatacctatatgtcaggccctaaccaaaggaggtttgtggaacttggagagatccaggaggtaacaccaaaaagctgcatttagcaatgcctgcctagccctcctgtacagctcatgttattttgttgccttaggccaccttacaccaaaccattcctatctccatgcttttgtttatgctgttgcctccttttagaagggccacgctccaccgctctgctgtgttgatactaccgacccttcctttagttcctgttcaattcccaagccttctgccaagccttcttggacattcccatcccatgctgactattccttaagctaaaacccttagagttaatatgatacacttggctacctcattgtttcatatcagtcattcctgtctctagctataatcggctcagccaaggaagatatatttatatggacaatgtctttgtgccttggctgtaaacagtgttgaataattaatctcacttgatgaggtcttacttaatgatagcctccaattattcaccaagacgaggggcaacgatgcttgtccattgtctgtgcaggctagactggaggaaagggccttggggaggaacttaaggtagatggaatttgctgatggaaatgttatttacttgatcaaattttccactggcattggtacatacttccctaaagagggttaaaaataagaaaggccctcctgggagtcaggagaagtgatgagatgtgctgtagctaggcccttcctttgtgaaatggagtttatgctatagccagatgtcacaatgctcaacaaatgactgaagtccatcgtaaacaacaccaaaaacaacgaaatgcatttattttaaaactactattttgaaaaaacacagtccctatggcaaaaaaaaaaaaaacaaacaaaaaaccctaaactttgacttggggtgacaatgtgtcggaatcctggcaaggctgaatgtccctttaagagacttgatcagagagggatccatcaacatcccaggggttggctggggggactgtgattctaaaattaggaacagaaggaagaactgaggagcggtgagaactaaattaggagaatgttttaggaagattataatttcagggaggatagctcataggagttgtgtattgcccttttgcaactgtagacattttttaccttataattccctgtttaaacctggacaactttaattggggattaaaaaattatggctgaaacacagagccatgttctaatgatgaagggctgcaatttacagaccaattaggatggcatttgttttcattctgcagcaactttttccccccagtgtacccctcaataacagcaaaacagattcctgggtccaaaagtggttttccggagctgacagctgccatatgcctttggctgacaggtgggggacaggttctggacagcttccagagaaccactccttgaattttgcccattttgtagagccactctctctgcaaaacaatgccatttaacttcaagctctgacaccttgcctatttctacttcactataaataaacctactccccccatttgcttgcctcccccaggtcaggcattcctcaattatagtcttaaacctggccaagcgagaacaaatggtgaccttaagttatatcttaaagtcctgcctcatattgggacgcagagtaagtttttttggcattctctttgacaggctgcttgtagatagaacagttttccataaggaattgaaatcatacatcaaatgtattgttttatatgtaagccactggagaccaatgaaagcagttggtagagcccaaataccattacaaatagatttattgtagtgtgttttctcccacctttttctagaagttattactttaatcttaagaatttatgtaagtatgcttgtggcttttatatggtttatgcattcactttggagacttttagctatttagtggcgaggtgtttaaaacaagtgttatcaaggaaataattttggctttacatcattttttttatatttgcctctgaatgctacatatagaatagccaatcggcaatataaaagagttactgtggatgtcatggaaacttatctttccagtgccctttagtttggtgtgttcatctgcacctccaaaaagcaagcggagataaacatgctgtattcctttgctgccaaattagaaaaagctctgtgccttccttcctgaaccgtttcaaagacagacagagaacattagacttcacagcaattaaactcactgtagtgtacatttactaaaaggactggaaatctttttttcagccagccccacagtaacagagctgttagaaaatttaaaaagaaaaatcctgaatgatgctgttagtagataaattaagtgatcttgcaagacccttctcatttattatattaatacttcaactacatcatatttagttaaaaattttttgcatattatcctacaatttaacctgtttagtaatttttttttcacaaaccccttttaatttaccaccttcctctacacacgcacagacgcacatgcttacttactctggtttcaaatattatgcataaactgatgttttgatttggtagccataatttctaagtctgttgatagaaacttgtcaatcatttccaaggcaatatgttgccatctaactgttttgatatatgtgaagctcttgtggtttgtctagttcttataaaaatactgcgtatcccctttgatccttcgtgtactttcaaaacttgatactggtggggaacttgactcttcagtttcttttgaacttgttttagaattatgacagtgtttttctagtacagaaaagtagacacacctaggggacccaaagagacctgactgttatgtcaaactaagagtgcacgtgttattcttctgacagttattgagattaaaaagcaggttagcagttttcttagaccatatcaggccctgaagaggagacagtggcttttaaatctctctgtggagcatgtttaggagggacagtgcctctctggggatggaggtgccttccagttcaaatactgtttggaaagtggggtgactgaaatcaattttctgaccctgtttgtgtcatcttccagaacacaaaggactcttttcatagacttttaagtttaagctctgttccaatctgagccagtctccaccctttggaaaccagaatatgccaccccaaaatatgtctctctagcgtaaggattattttgagctgattatttggaggtctacagccataggagaagcgccgacaacagaataaaagttaccctgttaaaagggaaatttacatctctcaagggaatttccattcatgaaggtggcttctgtctgtaccaagaaaagaaggctgactgcatcaccagagactcctttcactggagaaggtgccagctgaaatctgcagaacaaaatctgaaatctgaaatctgtttttgtggaccatacttcacctgaatacctacccagtatatgtctccctccactcccacccaacatccttctttctctgtttcatttcaagatggtatttaagcctgaactcaagccacctttttaagatttgctcactttttttctgggtatctcccttgtataaatgagttatcactggagctcagaaaacagtaccccaaaggatggcactttggcagcatgggaactttgaaatgaagcaaatgaaaagatcttagaagcagcttcagaaccaaagactttctcaccttctgtttctctccccaagtacagggtggaactctctctctctctctgaagttctctcatttgaagcttctcgagaagaatgaacacaattgccttcaatctcctccctgaaatttcattagccagaaaagattaaactcatattgcaggaaggaagactaaggaatgccaccacacctagacagactttgtcacaagctgtttgctgttctttggtcccattcagtttccaaaaagaattatttagaaactattgcctatttacaaattattctttgagtccaaccaactctcctaaaaatcatactcttttcaaaattgcctacattcccccatctccctctcccctaagaagagggcagtatttaagcttgaaccatctggtccttctttgagtcttgtattttgtatggctcccatgcacaccagcacattattaaatgtgtataccttttctgctaatctattatcagtttctttcagcaggctcaaactttcagaagaggagggaaaaattctctttgctcttatatcacacatgttaataagcttctatttgttcttctctgttaatctgtcttttgttatgggggtccattccaactaagaacatgaagggtggagagaaaatgatttttcctctcctataaccctttttggcagcaatggattactaaaagattattttcaaagcacagttttaattaatactttgaaatacacctggtaatacatactagtagctggcgcagtgcccttcagttgagaacctcttttaatgtctagttaaagatcatgtgtaattaacatactgattgttatagaacaaatgaatttagatatgtatgtcaagtttgtacacctaagtaggttaagtactcccacctgatgtgtctcatgctattaatttgctgagtaaacactatttttatagttgaaagatcagttccattccagccattccaaattagttttgttcaaactaatgagaccttattaaattcgaaaggtgatctagattggggattatagtcttgtcacaaatctctctgaaattggacatatatccagctttcaagccccttggtccatcagccccaaagcgtaattccttctaaggtttgcaaaccatagagttttacctgtacctttggtttttgctttttatcatcaacttgacttcaacataactgtcctcctagttattttctgtctcgttttaattgttttgtgcagaactttagtttctttgtcttttctaacttccactggatatcctgtttgaatcgtggatgcatttacatgttgcccccttacctagattctactcttgactcataatactgccccacttgggctagttttgggagaagcccttatctcaacttttcaccttgtctctatccatagcttctctgtggtcctaggctgcaagaaattttctacctcaaggtcaatactggaagacatctttttctgctttaagatttggctatcccctaatgtagatgatttttttctttcaatggatttcaggtgcatggaattgaattaatcataattcttggtttatgacacactatcaattggtttatgtgtaacatttataattatatgtgtgcatttacatagtcttaaaaatgcaatgaatgaaccaacccaagaattagaatatagataataacttatgtttttctgtgtggtcctcttcagtgtaatcattatcttgaattttgtgtgtaatatgccatttcatttttaaaatatttaactacaaatacatttatgtacctaaataatatattgcttagtttggggctgtttaaaactttggtaaaaacaaagcttgtcacgcttgatttttttttctgggatttacttttttcactcaacattgtgttactaaacttcatctgtgttgatgctatagcagctgtttctgcattttcaatgctgtataatattccatcatattcaagtgcaacagtttattctccagaagatggtcattatgttattatctttattattattattattattattatactttaagttttagggtacatgtgcacaatgtgcaggtttgttacatatgtatacatgtgccatgttggtgtgctgcacccattaactcgtcatttagcattaggtatatctcctaatgctatccttcccccctccccctacccaacaacagtccccagtgtgtgatgttccccttcctgtgtccatgtgttctcattgttcaattcccacctatgagtgagaacatgcggtgtttggttttttgtccttgcgatagtttactgagaatgatggtttccagtttcatccatgtccctacaaaggacatgaacgcatcattttttatggctgcatagtattccatggtgtatatgtgccacattttcttaatccagtctatcgttattggacatttaggttggttccaagtctttgctattgtgaatagtgccactgtaaacatacgtgtgcatgtgtctttatagcagcatgatttattatcctttgggtatatacctagtaataggatggctgggtcaaatggcatttctagttctagatccctgagaaatcgccacactgacttccacaagggttgaactagtttacagtcccaccaacagtgtaaaagtgttcctatttctccacattctctccagcacctgttgtttcctgactttttaatgattgccattctaactggtgtgagatgatatctcattgtggttttgatttgcatttctctgatggccagtgatgatgagcattttttcatgtgttttttggctgcataaatgtcttcttttgagaagtgtctgttcatatcctttgcccactttttgatggggttgtttgtttttttcttgtaaatttgtttgagttcattgtagattctggatattagccctttgtcagatgagtaggttgcaaaaattttctcccattctgtaggttgcctgttcactctgatggtagtttgttttgctgtgcagaagctgttgagtttaattagatcccatttgtcaattttggcttttgttgccattgcttttggggttttaaacatgaagtccttgcccatgcctatgtcctgaatggtattgcctaggttttcttctagagtttttatggttttaggtctaacatttaagtctttaatccatcttgaattaatttttgtataagttgtaaggaagggatccagtttcagcttctacatatggctagccagttttcccagcaccatttattaaatagggaatcctttccccattgcttgtttttgtcaggtttgttaaagatcagatagttgtagacatgcggcattatttctgagggctgtgttctgttctattggtctatatctctgttttggtaccagtaccatgctgttttggttactgtagccttgtagtatagtttgaagttaggtagtgtgatgcctccagctttgttcttttggcttaggattgacttggcgatgcgggctcttttttggttccatatgaactttaaagtagttttttccaattctgtgaagaaagccattggtagcttgatggagatggcattgaatctataaattaccttgggcagtatggccattttcatgatattgatttttcctatccatgagcttggaatgttcttccatttgtttgtatcctcttttatttccttgagcagtggtttgtagttctccttgaagaggtccttcacatcccttgtaagttggattcctaggtattttattctctttgaaacaattgtgaatgggagttcactcatgatttggctctctgtttgtctgttattggtgtataagaatgcttgtgatttttgtacattgattttgtatcctgagactttgctgaagttgtttatcagcttgaggagattttgggctgagacagtggggttttctagatacacaatcatgtcatctgcaaagagggacaatttgacttcctcttttcctaattgaataccctttatttccttctcctgcctgattgccctggccagaacttccaacactatgttgaataggagtggtgagagagggcatccctgtcttgtgcctgttttcaaagggaatgcttccagtttttgcccattcagtatgatattggctgtgggtttgtcatagatagctcttattattttgagatacgtcccatcaatacctaatttattgagagtttttagcatgaagtgttgttgaattttgtcaaaggcctcttctgcatctattgagataatcctgtggtttttgtctttggttctgtttatatgctggattacatttattgatttgcatatgttgaaccagccttgcatccagggatgaagcccagttgatcatggaggataagctttttgatgtgctgctggattcggtttgccagtattttattgagaatttttgcatcaatgttcgtcaaggatattggtctaaaattctcttttttggttgtctctgccagactttggtatcaggatgaggctggcctcataaaatgagttagggaggattccctctttttctattgattggaatagtttcagaaggaatggtaccagctcctcttttcacctctggtagaatttggctgtgaatccatctggtcctggactttttttggttggtaagctattgattattgcctcaatttcagagcctgtttttggtctattaagagattcaacttctttctggtttagtcttgggagggtgtatgtgtcaaggaatttatctatttcttctagattttctagtttatttgcgtagaggtgtttatagtattctctgatagtagtttgtatttctgtgggatcggtggtgatatcccctttgtcattttttattgcgtctatttgattcttctctcttttcttctttagtagtcttgctaacagtctatcagttttgttgatcttttcgaaaaaccagctcctggattcattaattttttgaaggtatttttgtgtctctatttccttcagttctgctctgatcttagttatttcttgccttctgctagcttttgaatgtgtttggtcttgcttttctagttcttttaattgtgatgttagggtgtcacttttagatctttcctggtttctcttgtgggcatttagtgctataaatttccctctacacactgctttgaatgtgtcccagagattctggtatgttgtgtctttgttctcattggtttcaaagaacatctttatttctgccttcattttgttatgtacccagtagtcattcaggagcaggttgttcagtttccatgtagttgagcggttttgagtgagtttcttaatcctgagttctagtttgattgcactgtggtctgagagacagtttgttataatttctgttcttttacatttgctgaggagtgctttacttccaactatgtggtcaattttggagtaggtgtggtgtggtgctgaaaagaatgtatattccgttgatttggggtggagagttctgtagatttctattaggtccacttggtgcagagctgagatcaattcctgggtatccttgttgactttctgtctcgttgatctgtctaatgttgacagtggggtgttaaagtctcccattattaatgtgtgggagtctaagtctctttgtaggtcactcaggacttgctatatgaatctgggtgctcctgtattgggtgcatatatatttaggatagttagctcttcttgttgaattgatccctttaccattatgtaatggccttctttgtctctttttatctttgttggtttaaagtctgttttatcagagactaggattgcaaccactgcctttttttgttttccatttgcttggtagatcttcctccatccctttattttgagcctatatgtctctgcacgtgagatgggtttcctgaatgcagcacaccgatgggtcttgactatccaatttgccagtctgtgtcttttaattggagcttttagcccatttacatttaaagttaatattgttatgtgtgaatttgatcctgtcattatgatgttagctggttattttgcttgttagttgatgcagtttcttcctagccttgatagtctttacaatttggcatgtttttgcagtggctggtaccggtcgttcctttccatgtttagtgcttccttcaggagctcatttagggcaggcctgctggtgacaaaatctctcagcatttgcttgtctgtaaagtattttatttctccttcacttatgaagcttagtttggcaggatatgaaattctgggttgaaaattcttttcttaagaatgttgaatattggtccccactctcttctggcttgcagagtttctgctgagagatccgctgttagtctgatgggcttccctttgtgggtaacccgacctttctctctggctgcccttaacgttttttccttcatttcaactttggtgaatctgacaattatgtgtcttggagttgctcctcttgaggagtatctttgtggcgttctctgtatttcctgaatctgaatgttggcctgccttgctagattggggaagttctcctggataatatcctgcagagtgttttccaacttggttccattctccccgtcactttcaggtacaccaatcagacgtagatttggtcttttcacatagtcccatatttcttggaggctttgttcatttctttttattcttttttctctaaacttctcttctcgcttcatttcattcatttcatcttccatcactgataccctttcttccagttgatggcatcggctactgaggcttctgcattcgtcacgtagctctcgtgccttggttttcagctccatcaggtcctttaaggacttctctgcattggttattctagttatccattcgtctaattttttttcaaaacttttaacttctttgctattggttcgaatttcctcctgtagctcagagtagtttgatcgtctgaagccttcttctctcaactcgtcaaagtcattctccatccagctttgttccgttgctggtgaggagctgcgttccttcggaggaggagaggcactctgctttttagagtttccagtttttctggtctgtttttttcccatctttgtggttttatctacctttggtctttgatgatggtgacgtacagatgcactttttgtgtggatgtcctttctgtttgttagttttccttctaacagactggaccctcagctgcaggtctgttggagtttgctagaggtccactctagaccctgtttgcctgggtatcaccagtggtggctgcagaacagcggatattggtgaactgcaaatgctgctgcctggttgttcctctggaagttttgtctcagaggagtacccggccgtgtgaggtgtcagtctgcccctactggggggtgcctccccgttaggctactcggaagtcagggacccacttgaggaggcagtctgtctgttctcagatctcaagctgcgtgctgggagaaccactactctcttcaaagctgtcagagagggacatttaagtctgcagaggttactgctatctttttgtttgtctgtgccctgcccccagaggtggagcctacagaggcaggcaggcctccttgagctgtggtgagctccacccagttctagcttcccggctgctttgtttacctaatcaaacaactaactgggcaatggcgggaacccctcccccaacctcgctgccgccttgcagtttgatctcagactgctgtgctagcaatgagcgacacacggtgggcataggaccctccgagccatgtgtgggatataatctcctggtgtgccattttttaagcccattggaaaagcacagtattagggtgggagtgacccgattttctaggtgccatctgtcacccctttctttgactaggaaagggaattccctgaccccttgcacttcctgggtgaggcgatgccttcccctgctactgctcgtgcacagtgcgctgcacccactgtcctgcacctactctctggcactccccagtgagatgaacccggtacctcagttggaaatgcagaaatcacccatcttctgtgttgctcacgctcggagctgtagatcggaggtgttccttttcggccatcttggctcctccgttattatctttactgttgcttattttgaacaggcctacaagcatctcctggtgcacatgacctagagtttctcttggaatagagtcgctgagtctttagttatgcatacttttaactttactagaaaataccaatctgttttccaaacagttgttctagtttaacattcccaccagcaaaatagtagagtttctgtgtatatacattttctccagcacttcttattgtccaatttattatttttgaggacaattaagtgggtgtaaagtggtatcccctagaattttggtttgaatgttcatcttcccttaggtgatttttccagaactggaattctgtatctcctttgcactaacaaagcagtagattactgtaaagctataaaacacaaattaaataatatgatcatctgtaatgcagcagtcaaggagtgattaggatgtgctgtgaggacggaagagaagtcattcttacagtgcagtagaaaaagccttggtcttgaatcaggagagtcagtgcctggtcctagctctgtaagtgattggctgagtgactcacatgaaaacctcatttttcagtgtttccatttcctcatctgttatttaagggtgttgatcacagagagtatgctctggtctacatttttgtcatttagtaaatcataatcatcacattcttttgggtgtttctttaaagcatttggcctccattttctcaggtgatatttccaatacctaagtaatgtaggcagagaaaagatgaaataaaagcctacaaattttggcaggggtctccgtagtgtgactgtggggagaccaggaagctcctcaagcccataaatatctctgttctggcctcccttagagcctaaaactccacaattactgtttcactgctatagttcttgaatgcctttgggtctgttggagtcttccattaaaatgcaaatgtccctggagggggtggggagagcctttaagctcattatcacctaaatcttccacagggattaattgatcagatccttccccatcagacacctggttggaaacagagcctgtgggaatgggcacctggttgatgaggggaagccctgggagggagaagaaaggttataaagagagaggtggaccaaccagggctccctagggtttggccatttgctgcttcccacaggctcatctctagccagaagctcaaaatccagctggtcaaacacactgggctactgctgtctccttggggggaagtttcctcttagaactaactaaaggctgccaaccagcggcaaaccctcctgtgtctgcaaatggctgccaaaagcccctccgcgctacacacttctgtggcagatgcctctgagcagccttctttatgagtcagtgctaaagcctagcccaggttctaatgtggccactctgaggcgtggacaggccttgtcaaaggctgggcatgcgtgtgggtgcctcatctgctttgtttgacatccaaacaactcttttaaaatgtggctctagccccacctcacaaagggggcctgaagggtgttgtggaatgtgcttggacctgctctgttttctttcggtcacccacacaaaaatgtgccttcccctcccctgccaggaaactccctcagcaatgcatggttttgcctccgctgaccctggccccttaacatgtcagaatgttaataaaacactacggctgtcataacgcaaggttaaatgaagtcttcacaacctgtccattaagcggatgtttgtgtgtgtggctttctgcagcttctctctggatacagcctgtctcagtttgtgggcagtcgatcgagccttgggcctttgtctttgttcactgttgtgtttaaatcccccccattcattaatcatccctttgcctatttataccggtggcaaggatagcgaacacacttaacgtctgcttttgttttggtggcaccctttgtgaggaccaaggcagagctaattattaactgcgaaaagacgttaaaacttttagataagcgccaaatgctgcatccactgagacgcagttttgtttaaaccttcgagagcttgcggccaagcaactggggtggctttatttagctttgagtccaggggagtgatgccagtgctcagataattaatagaggctctccattaagacccagccgggcagcagaatccaagcgccctgtatgcacctctgaacacccagctgggtcatccagacctgagcaggcacaggcaggggtggcagcttcagacgtagggctcaagggggctcctccaacctatatgtttacatttcctgtgtacatttcctgtgaagatcttcgttgtcagcttttggtgacttttacaccctccagtaggatcctgattttcctttgctgttggacattttgtggagccaactattttaggtacagctatatcagcttattaaacagttatgcggcttgctactgttcttctgaaagaggtctccccgaccacgttttctaaagcagttgcctaagcccacagccatccctcagttacctctattccattacccagtttttttttcccctccaaggcatctgtcgctatttgaaataatcgtatttgtttgtatttcttgtctgtttgatactagaatgtaaacctcttgtatcctttgcacttagctcttgatcgtcgcctggcacatatcaggggccaaacagatatttattttatgtgtgggggaggaaaaaaatatatttccctctacccattctaggctcattggccagggccctgtaaattagattgccaaaagataggttaacaagagaaaagtattttttgttgttgttgtaaattttatttttgaattgcattttttcctgctgatacatgaaaaagcaattttttgttttcatattatacacaacatcctaacttaacttttgtttatttactagtttgcatttcttaagtagacagtcatattatctacaagcaaaagatttgtttcttcctttccaatccttatagtttttattgctttttcttatcttattacactatataggacctccagtgtaatgtaggataaagtagtaatggaattatatcccaaaagttttcttaaaaataaagaaagcccacattactagtttacccacataataaaatttcttagaaccacataataaaatttcttagaacataaaattcttcgtttttaagtatccaattcattggtttttagcatatccacaaggttgtgcaactgtcaccactattcaatcaaaaacatttccgtcattccaaagagacaccccttaaccatttatacttactcccaatctgcctcttccttcagcccctgataaccttaatcaactttctgtctctatagatttgcctattcttggcattttatacaaatgtagtcatacaacatgtagcctttcatgtctggcttctttcatttggcatagtgttttcaaggatgattcttattgtatcataaatcagaacttcctttcctttttatgggtaaataatattccattgtatagatataccatattttatctatccattaatcagttgatggacattttggttatttctacattttggctatgatgaataatgaataatgctgctattaatattttttgtatacgtttttgtgtgaatatgtttttcagtatcttgattatatacttaggagtggaatttctgggtcatatggtaactctatgtttaattttttggggaaccacccagctgttttccataggtagtgccattttacacatttccactagcaatacatgagagtttcaatttctctacatcttcaccactacttgttattttttcttacagtgatcctgtgggtgtgaaacagtatctcttttggctttcatttgtactactctaaagactaatgaagttgagcatcttttcatgtgctctttgattatttgtatatcttctttaaaaaactgtctattcacattttttggcttttttttttgagacagagtatcactctgtagtccaggctggtgtgcagtggcgtgatctcggctcactgcaacctccacctcctggattcaagcaattcttctgcctcagcctcccaagtagctgggattataggcatccgccaccacgtccagctaatttttgtatttttagtagagacggggtttcaccatgttggtcatgctggtctcgaactcctgacctcgtgatctgcccacctcggcctcccaaagtgctgggattacaggcatgagccaccacgcctggccttttttggctatttttaaattgagttatttgtctttatattgttgagttacaagagttctttatatattctggatactaaacctttatcagataaatggtttctaaatattttcacccattctataggttgtatttttggtttcttggtagtatttctgataaacaaaatttttaattttgatgaaattcaatgtatttattgttttctttgatggcttgtacttttggtgttacatctaagaaactattgactaatccaaggtcatgaagatacacacctgtgtgctcctctaagaattttgtatctttggcttattcatttaggtcttttattaagtttggattttgtatatggtgtgaggtagggtgggtccaaatgtagtcttttgcatgtggatatccagttctcccagtattatatgttgaagagactggagagtgggcattcttgtcaggttcttgattttaaaaggaatgtatgctgttagattttttaaatgtaatatttatcagataaaagtattctatataattatgataatctaagagtttaaatcacatactagcctcttcactggaatgtgagaaccaatgtcattcccttcattaggggtgcagtcctgggatataaccttggcaatagaaatttagtgcttcctgtacctagaacagtcacgaaacaagataaagagaaggtacctattgctagtcctgttcagcagagtgactattcctgagacttggctagctcatagatcttaacttttgtgcctgcttcaaatgttggcagtggccatatggactgttgtgtttagaagtcttaggttgctctgatatcacagcgattgattaatgatatctgaaacctgcatgaaaagagataggcaatatagatatgacacatttgccattcttgtattggtccctctttctctgtcagatctgtcgtacttgaccctttttacattaaattgctctgtggatagaaccccttttctttcttgatcattggatttggccatttttctcttgttcagcttaatgcttagttctgactccttctgatggatacatcctgtttaatacttatgtatcagagaacaaagtcacaagctttgctaaggtagacacatgtgtttgacagtcctggccccaggtattctgttttgttgtcagattacgtgtcagaagaatatatccccataaggagtgagaaaatgagataaaaaatacaatattcagaatgacaattagagcatctagaccaaacaatatcataggcaacctctatgtctttttgaaaaatacaatataaaagatgacttgcagtgaaggaggtagtcctctttcatgagacatgtagggaataaggttgaatgatcaactaatgtcccaaagtctcacatgccatatggaatcagtatcatgttgatggtttggagaatttcctaggaatgcagtctgtggtaccaatattgccctttccgaaggcttaggggtctgcctttatgatcaaggcttttatctgcattacagttcctggcacttgaaagcttctgatatattggattatttgggattaacattcagcatcaaatagtatagaacttcatacctctctcatggcatggtccggacattagcaaggcgggacttgtgcagtggctccattgtggcagggagtcagctcattctagctcattcatgtaccatgtttatagtccctgtggcaaagaagactcatctccccattgttgtatcacattaagcaaaaatgcaaaaagaaggagaaagcatgctcattcttcttaaggacattgcctggatgttgtataagtcatttcggctctcattcccttttgccagaacttaagttacatgaccacacctctttgcatgttcccatcaaaaaaaacctagcagtgtatttcctagagaagaatgagacaatagattttggagaacaaccagcagtctctgctgaataacaatattttgttaaataaatgagaaaagctaaatcaaaataaaacagtgtagaaatatattacccttaagatcaccagatccaagcctttaatgatcttaatggaaaagaacacagatctagtattccagacatccatgaacttttatttcaaggatgtgttgctatggggcacccttcatttgctggcagtaacctgaaacctgggatgaaatgaacatacctgaaatctctgtcactcttctccctaaaggtcatcagaggagttgcttctacaacctaagaggaaggatcattaatttcttaatctgtctaagggtagatcgtcacttacctggaagctgttttataaagggaatatgttagaatggtagacaatattagcatttttcaatatatgattttcatttcctttctgagctgagatatgaaatgcccctgtgcaacttcctatttaacttacatcccagctgaggtcatcttagagggtaccttgtattttgggatggtggaatcacaacatccatctagtaactagcttactagacagctgccctagagagtcattcacatccacgttgatattgtttaagcgcctaaacttttgctgtattagggtgataagatttagggatttctggttcctgcatatgacgcagtctatcctgactatcacattttgcaagtacttatcagcctccaggtgtaaacagagtcattgattatggagtcctggaattgactagaaataggaaaagtatttactctcaaatatcttaaaatgtggctaactcatccaattatagcaactcaaggtctaattgtaagccaagtcttacagaattgtgttcttaaaacaaaagagtgattagtgttggatatggttcatctgggaagacttcctttaacaggaaaaaaaaatcactttctccatctgtgctggaagaaagtaactcaaacacagtcaggaacagagaatgtatgcaatgtaaatggctaaacctgacagcctctggctaattggaagtgtcggtgttattgtgcttaggttaatggggctctttagtttaccatctgagctgcttctcccaaggaatcacagcaaccagcagtctccaagggctcaaaaaccctggaggacttctctttggtccctgggagctgcaccctgggcacttacagcaagctcacaggtgatgagaactcatagttcagcattttgcttctcttctatgaaaaaaaccgactgttttcttcataaattagacccagccaaagatcttgattcttccattattctttccaaacagtgtcataaaagagaagaacaagagggtggactagggacctctgacttctgacccttcctccttaagcagcctgatatactctgcaggctgcccttctgatggccacagatgacaggaagagttgctgaaaaaaaaaatatgggcttaaccaacattcacagaccaactccatgcctggcagtccctgagccacatctttgacttatgatattagaggagtattatgggccattggtttagattctttatgatagcattgacatgtcatagaatgtcagctggggacttaaggctcatgatagctcaagatgacataccattaggcttagactaggcaacaagtggctattggaatgatgggacatttataggagagcaggtaagatcagatttcttccaagatacattctttctcctgtagaggcttttgtcatttcacttatcccactgaattactttccctgttgtgttaggtatgcctcaggggcagagaacgtaatacatttcacttttaggttcttggtgcctggaggagtgtgtaatgcatagttgctgctcagttaataatgtttgtattgaatggaaataaccaagagtctttggtctagagaggaggagaatgaagtgtcatgatcaagatctgttaaatcctacatggggaagactaggttgaaaggggagttagttgctaagtcctaaatacagagttgggagactcccttttgaaaatggatcaaggtaaatttaggaccaatacaaagatgatccagtttccacgtcaggaaataagcttctagatctcattttccaaaagatgatagtggaaagaagcaaatgaatttttgccatagtatatttcaaattgaagaatggcacagcttttaatagcttagaactgggtgcagtggctcacacctgcaatctgagctacttgggagtctgagtcaggaagatcacttgaggctaggagtttcagaccagctgagcaacatagccagaccctgttgccaaaaaagttttttaaaaaattagccaggtgtgatagcatgcacctatagtctcagctactcagagggctgaggcaggaagattgcttgagcccaggagttcaaggctgcaatgagctatgagtgtgccactgcactgcagcctgggtgacagagtgaaatactgtctcttaaaaacaaaaaaaaagaccctaaatgaaggcttaatgtagacctccgagatggacagcctgagcctccaatgactcattttttagcattagtgacaataaaaaaaattatgtgtatgtgtgtataggcatgtgtcacttagcaatggggatacattctgagaaatgatagatgaaattaggtgattttgtcattgtgtgaacatcatagtatatgcttaatacaaacctagatggtatagcatgcaatacacctaggccatatggtatagcctattgctcctgagctgcaaacctgtacagcatgttcctgtacagaatactgtaggcagttgtaacacaatggtaagtatttgtgtatctaaacaaaaaaaaagttacagtaaaatacgatattataatcctatgggaccaccatcttatatgtggtccattgttgactgaaatatcattatgtgatatttgactgtatatgggactggtcaaatatgttttccttttctatgatggcctcagagccatcatagactatctataacttcatctctaaccattctttcatgtgaatcttatgtcctagggactttgatctacacattgtactttagacagaccatttaacctgcatttattctcttttccttttcctaccccctttgcctccttcttcctggtaaccttcatttttgctttcctatataaaaccttctaaaccaggcccctttgacctctctcttcttacgtactaatggcaggtgtagactttactgatggtttgctgatagctgcctttaattattatttatgtttttaggcacttattctacttctccaaacttaagactagtgaatacatggtcctttgtgatttagctagagtagaaagctcagtcttatgaaatgaaaactgatatattttttaaagagaacgtactacgaagaaacaacaaagaattaataaaaatgttaaaatcagtaacatatcactaacaatattactaaagatgcaaccattagattttaaaaatctaatttaatggattgacttgttgaatatcagaactgcaagaaaccttaaagatcatcatgctgaattcttatctcatactggtagatgtacaactccaggacaattaatttagtggtagagttaaaaatgttattccttctaataacctagaaattctcatacatatgtatatgtcctaaagaagcttggatatattcataaagtaacattacagagatatctactaatagcattgttttgtgataatgaaaaatttgaagcaaaataaatgttcattaataggaaattagatagataaaatgcattctattcatgagatagaattctagacagaggttaaatggatcaaaaggaataaaacttaaagaaaatcatatggtaagtagaatatgtacaagctcatatccattattatcaaaacaatgttatttctggatgcacatagatgttgaactttaaaaactgattcgtgttctttattttttaatttggaaaaatataccttaaagtgattatgctgaataaaacaaccatctaacattcttattttcaaataaggaaatgcacatcaagagttgtgcttggtgtatggaccatgtttggaccctattttgaaccaaatgaatattaaaaactttatgagtgccacatcttctgtcatcagggaaatgcaaattaaaataatgagataccactgtgcacctattagaatagccaaaatctagaacactgacaacaccaaatgcggatgaggatgtagagccttagggactctcattcatctctggaggggaaacaaaatgagacagccactttggaagatagtttggtggtttcttagaaaactgaacataacttagcttatgatccagccatcacactccttggtatttactcaaatgagttgaagacttatgtccacatagaaacttgcgttcaggtgcttatggcaactttattcataactgccaaaacttggaggcaaccaagaggtccttcagtaggtggatgggaaataaactggggtacatgcagacaatggaatgctattcaacactaaaaagacatgagctatcaaaccatgcaaagacatggaagaaacttaaatgcatattcataagtgaaagaagccaacctgagttatatgctgtatgattctagctatatgtcattctagaaaaggcaaaactatagagagagcacaaagagcagtggttgtcaggtgttatgggggaggaaaggatgaataggcagagaacagaggatttggggggcagtaaaaatactctgtatgatagtgtgatgactgatacatgtcatgtatctgtctaaacccatggaatgtacaacaccaagcgaactctaatgtaaactatgagctttgagtaataacgatgggttgatgtaggttcatcagtgtaacaattgtgccactctggtgggggatgttgataaggggggaggctatgtatgtatccccccatttcccaggggtatatgggaaatctctgtaccttcttctcaattttgctttcgaatttaaaactgctctaagagaagtctttttttttttttttaaagggaaatctgaagcaaatattagaaacatattagggtggtagattcacatgtgtcattttatcttgtctctggaccttaaatattttataattgaaagtaaaaagttcttaatgtaaaaaaaaagactgaaatgatcagggaaatctgacactgactggatatttgataacagtaattataagcttttttaggtatgacaattgtggttatatttaaaattttttttcttagaggtacctaagagtatgtatggaagaaattatttgatgtctgggattcattcaaaaaaaatttgcttgggagaagagggaatagatgtgagtagatatagttgaaactagattagctgtgtgttgatttatagatacaagagggctcattatactgtagtctctatacttacaatttttttgaaatactcccgccaaatttaaaaaattggccttaaaatatagttttagaaccaatgctccttatccagtgctgtttacaatctatctcattgagaccatgataggttggactctctacactggccagagcaagaaagggtacataagcaggttttgcttacaattattttcttactggaggaagtttcgtacaaagagtaatttttatttatgaaaagcagtcccccgttgagccatcagttctagttgaggtgtatctaagatttctttttctttccaaacatgtcaaagcaaccaagccacgtgattgagagtgtgggggcctgaaacacccgcaagcaaccgcaaggggtgggaggttactcattccaacttttatgatgtcccgagaaacggttgcgataagagaaaagactaaaaaataaacgagagataactgagataatgggaaaaacagagggaaacaagacaacactctccagtctttggcttgagatatttattatgccaagggagataaattggagaaacatgaaaagggaaagagatcttgtctctgactcacgtatttctctttaagtgaatgagcaataacaccggaataaaagagctcaaaacagagccatgtgctcagccaaaatcatggttcctaatgaatttcaacgttggcagaagcctcacacgttgtacttgaacagctttcttgattttgaattatacatgtaattcatcctgaccagaatgtagcctgagagccgagatccgaatgtgagtgggaaatgagaatgctggtcacgtgctagagccggtctttcttcttcacgtcagaaatgtctgtgctgtcatcagtttggacagttctgggaaacaaacaaacaaacaaaacttaggaaatcaattgtttggagtcatcttggcaaatacattgtcatatgacatattttcttttcctaccaggctgttctgtattagaaagacacagcccaagatagtcagactacaacgcatgaaacaaatgttgatgaacagaaagggtcaccgatgaggccaacagtccaaaactgtccacctggccttcctgccctgtcttttaacaggacagaggaggatgaaggggaacaagatagacctagatgtggtggcaccttagaaaatttaaccaaaagaagggctgttgttttgctgattctactcagtgaatgcagtggaaagaaaatcagattcagtgggaagaaaatcagattctgctcgctctgtttttaaatagtgggtgagctttagctcacatttcatagagcaaacttttttagggtataaaataatattctttagtaactaaatttacagtctttgttcactgtaactttgactttacttctgaataactgcagctgacaggtcatttctgactattacatgtgttttttcttgagttcaagctaataacccaaaatgttagtcaatcctgcaagtgttatttgcatgtccttaggttttgttaaggtacttcgtgctgtggtgtttactttgggatagaattaaactgttgtgggaaggtgctttcaagaaagtgcttacgagaacaaaagttgttttgaaggtaggtaggtaggtggagggaagaagaaaggagagagagaagggaaaagatcgctggcagagttggaaaaaccagtaggttccaatcccaaatctaccatttactagccctatgaatttgggcaatttatttaacaagcctctttgatcctgtattagtcaattctcgcattgctacagagaaatactggagactgtctaatttacgaagaaaagacatttaattggctcacagtcctgcagcctgtaccagaagcataacacagccatcggcttctggggaggcctcaggaagctttcaatcatgacagaaagtgaaaggggagcaggtggatagtgggagcaggagcaagagagagggagatgctacacacttttaaacagccagatctcatgagaagtcacttgttattgcaaaaacagtaccaagaagatggtgctgaggcatttgtgagaaatccatcaccgtgatccaataacctcccaccaggccccacctctaatcctgggattacaattcaacatgagatttggggaggacacgcatccaaactatatcagcccctcagattatttatgtagaaaatgcaggtgatcactacctaccttgttgtgttgttatgatgattatagataatggcattatttttaaaagaaaggaatgaaagggaaagatacatattctaaaaatgaaaaatctcccaaagcaaatcatatttataggtctgttgctataattccagattttaattttattaaatgttcagaaaagaacaaatcacagatccttggttccaaataagcacatgggaaattatgtgaatattattaaaacgtgagcttcttgtgacaatagtgacattattggaacataaatggcagctcagtcagcgtctccttgtaactatatcaaagaaaagacagttgcagctttgttctctgtgtgacccacttggggtttggctgcttgttgatggatattatcatttttaatgtcagtaaataatgtgatgtcagataaatgacctgtttcctttctgtggtataaagctcatttatctttagggagcttgagtgtgtagagaaatctgagtgggaccaagggtttctgactatgcaggatgggactttttttattaatcctgcttaacatgagtcccaggcagtcacattcaattctaaatgtatgtgtggtaaatcaatggaagtgatatgcatttaccatagactgttttactgattggagaaaaacagaaagtaaactttttttttcaacttgaagaaaatgatgctatacataaagcattactgtgcacgtgcatgtagtagacagaagacatctttctatgtaattcatacttggcttagctagacccttgttgctttaaggaattacggtggtataaaattaaggatcaggaagatgcattttaattaactttactgctaatagctttggagatcacaaaaatgtgaactatggtagagtcaaaaagattctgagatcacaggaaattatgattttgatttctgggctgtagtatctgcttccttcctaagatgaccactgaaaagtccacatcttttatttctgaagatgagtctcatgaatccattgtctctgtttttcatgactgcacatttagccaaagtcactggaatgccatattctctgatgggagatttagtcagggcaaaaaagggccatttgcttttctggaaacctttagacagggtgacaattattccaatgagtttttcttaatattgtgagctcattttgaaacacttccttaaacaaccctctgaagtttcctaggaaaattcatggactctcagagaaccaagtctggaagcctctttagaaatcatttaattaaaatgtttgatttttttttccgatgagaaatcagaggtaaggaatttgctctaggtcccaaggtgagtttcctgcataggagactgaacacaaaggctttgtgtttttactaaaacattattgttttgtcagatattgaaatgtccactgatgatttaatgattaaaactgagaattttttagatttacttttctcagttccatcatattatagagctggcagagagggtagagtaggtatttattttactacccaatgagtagtctcgagaaagacagtgtccacctgttttttctagaataggggttggcaaattacagcccataaaccaaatatggccagtggcttgttttttgtttgtttgtttttacatatgagctacgaatgctttttacatttgtaaaaggtggcaaaaaaccacccaaaaaacaaagaatatttgagatatgtggtgaaggccatgtgtggtctgcaaagaatgaaatatttcctatctggccctttacaggaaaagtttgccaatctgtgatctaaaatattcagagaaaggttctgtgaccttccttgtagatcccacaatacttttgtgtttatattttttaaatgagcatcacagattgcaggaaaataggaaacaatttaatttaatttaatttttagccttgaaaaaaattccttttattgaatttatttatttttccagctgtaaaattggaggcaccactcagaccttgtttggctctatcattttatgagtttatggattacaacagtgaacaaagggcacgtgtatcagtcctttctcatgtgagactacgtaatttataaagaaaagagggtttgtttgtttatttgtttttgtttttgtttattgagacgaagtcttgctcttgtcccccaggctagagtgcaatggcacaatcttgtttcactgcaaactctgcctcccaggttcaagcaattctcctgcctcagtttcccaagtagctgggattacaggcacctgccaccatgcccacctaatttctgtattttaagtagagatggggtttcactatgttggccaggctggtctcgaactcttgacctcagatgatccatccgcctcggcctcccaaagtactgggattacaggcgtgagacgccatgcccagccaaaaagagagttttttttgagacagagtcttgctctgtcacccaggctggagtacagtggtgtgatcttggcttactgtaacctctgcctttgggttcaagcaattctcctgcttcagtctcccaagtagctgggactacaggcatgcacgtccatacctgactagcttttgtatttttagtagagacggggtttcaccattttggccaggctggcctcaaatgcctgacttcaagtgatctgccagccccagcctctcaaagtgctgggattacaggcgtgagccattgcacccagccaagaaaagaggtttaattgactcacagttcctcattggctgaggaagactcaggaaacctaccatcatggcagaagaggatgcaaacatatccttcttcacatggcagcaggagagagaagaatgagtgaaggaggggaatagccccttataaaaccaccagatatcgtgagaactcatgatcatgagaacaatatgagggtagccgcccccattatttaattatctcttaccaagtcccccccacaacacgtgtggatagtgggagctacaattcaagatgagatttgggtgggaacacaaacaaaccatatcagcacactcattcagcacatattcagtgggtatcgagaggctatgctggatgctttgggtaggttggtgaacaaacagtatggttcttgcccttctagaccaatattcagtgggaatacagagggaaagaagaaataatgaagtaaacaatgatgggcatttgtagcggttaggcaggattcagtgtcagataactgtcaaggggaaattcctgagagactccacccactgatcatttgtccgatgtgaagggcaatttatcctaacttccacacatatttatgggtcattttctatgtaccaggcatgaggctgtctgttaggttgagttctcagtcaaaaccatggacaaaggcctccttttggacattttcccaaacctgcttggttctttgttaaaatggtacttgttccaaccttcttttgtttgtttttaacttttattttaagttcaggggtacatgtgcaggtttgttatataggtaaacttctgtcatggatgtttgttgtacagattattttgtcacccaggtactgagcctagtatccattagttacttctcctgatcctctccctcctctcaacctctaccctccagtaggccccagtgtctgttcttcctctcttatgtgtccatgtgttctcatcatttagctcctacttatcagtaagaacatgtgatatttggttttctgttcctgtgttagtttgctaaggataatggcctccagcttcatccatgttcctgcagaggacatgatcttgttcttttttatggctgcgtagtattccatggtatatatgtaccacattttctttatctagtctaccattcatgggcattagggttgattccatgtctttgctattgtgaatagtgctgcagtgaacacatgaatgtgtatgtcttgatgactgaacaacttatattcctcctaggtcgaatggtagctctatttttagctctttgagaaatcaccacactgctttccacaatggttgaactaatctagactcccaccaacagtatttaagcattcccttttctctgcaaccttgccagcatctgtcttattttttgtttgttcgtttgactttttataatagatagccattctgactggtgtgagatggtatctcattgtggttttaatttgcatttctctaattatcagtgatgttgagctttttttcatatgcttgctggccacatgtatgtcttcttttgaaaagtgtctgtgtttcttgcccactttttgatagggttgtttgtttttttcttgtacatttgtttaagttccttatagatgctggatattagaccttcgtcagatgcatagttttgcaaatatcttctcccattctgtaggttgtctgtttactctgttgatagtttcttttgctgtgcagaagctctttagtttaattagatcccatttgtcaatttttgcttttgttgcaattgcttttggcatctttgtcatgaaatctttgcctgttcctatgtgcagaatagtattgcctatcttgagttaatttttgcatatgatgtacggaaggggtccagtttcaatctttggcatatggctggccagttatctcagcaccatttattaaatagagaatcgtttccccattgcttgttttgtccaatttgtcaaagatcagatagttgtagatatgtggccttgtttctgagttctttattctgttccattggtctatgtatctgtttttgtactagtgctaggctgttttcattactgtagccctgtagtatagtttgaagttgggtagtatgatgcctccagctttgttcttttttgcttaggattcccttggctatttgggctcttttttggttccatatgaattttaaaatagtttcttgtagttctttgactaatgtcaatggtagtttaatgggactagcattgaatttataaattgctttgaacagtatggccattttcatgatattgatttttcccatccatgagcatggaatgtttttccatttgtttgtgtcatttctgatttttttgagcagtgttttgtagttatccttttagaggtctttcacttccctggttacctgtatttctaggtattttattctttttgtggcaattgtgaatgggattgtagggaatccaatttcaaaagaggcctacttgggaccaattttaggaatagtttttgtcctcaggaataatccacctgctttataaattatacattaagccctgagctaaaatatgggcaaatctgtctctctcctcttccatagaacttttgctgacttgttagccacaggactttgaattatataatttctcatcaaaaccacatctatttcctgaaacacttcaaaatagctttgactcctaggaaagtctggttaaggagttcagacaccaccttagtggaagcccatctcagtgacaccagatttcctatgttgattgggaagccatgctctgtgttgggagagaaaaaaacatgccttgtagctagaattatgcccaggggtcctcatggcttctgtttccagagctgggcaatggccatcctcagctttgccactactgttttgaacaactttgctcaaacagaagcattgttctggaacttggcgaacttggtgatgatctgaatcatcaatttcagtttgttttaatctggtactgagtttaaagtttaggtagttcaagggtaaagatagcaaaaaaaggaaaggaaaggggatgatgagtagatgaaactgtatgatgagtagatgaaaggggatgatgagtagatgaaactgtatgatgagtagatgaaaggggatgatgagtagatgaaagatgttttactaaaaacaattggtaaaagttgtcagatctatttccatatatctcttccacacattcttttgctttatgttcttaaaattacaatagatctcattttatccttgacattggaattctgaaacatacatgcattccatgaagtccactgtttattgttgaagccaataagtaagacagaacaaaagcaaagtgaagttagaaaggtatccactgtataggtactttacaaattgtgggtaacaaggtggggagaaaagaaggacattctaggagggaaaaagataatatgtattaaggaaaccatattatggggagttaagaactatgaaaatcagtctttctttccttagaatagctcttttcagcctgccccatagtaattctaaaattattggcaggaaaatttggtgcaggcacagcaattagattgaatctgttgctgataggattcttcggcataaaactggatctttttgctacaactaaccattcattccacagtgctttcagttcccagaataattcagctcaagggaatattgacatttttgtctgaatccattctgagtttcatcctataaggaaaacatttttaaatactcttttagccatggtcttgggagcccctgaaatattctttccctcacagatggcagtgccttttcctgctgcctctcgtgttggatcttctctatcccacaggagcagacgggatgttggagcccttctgttagagcagatgggaagttggtatcagggctgatggttaaatcactgagaccctacattagcatgtctgaggaagacagatttgaggctgtcttcctaagaattttctttagtggtcattaaggaagactcagaagaaagattgggttaatctctgtaataagcccatagtggaggcctaatgacagtcagaatattttctggtctcatgggtcttcaaagaaagcaaactcaaggtcctaccaagttcagtgttttcaaggttctaaaaaattcaaggttctcaagggtttaaaagctagtgaaaaaagattacagcccagcttagtagaaatggtagactccaacacattgggtgtgataggagaattcttcattgtcatttgggataggacagctgtttactgtgaggctgccccatgcattctaagaggtttacctctcagaggtttatcctcccatcacccaagggtatggccttacccttggatgatggccatttctccagtgaagtttcctgtagcctgtgtcctagagtatgcagagaggaagctgaaaggtaaaataatcggaggattggactacagactttgagccagttgtttaaaagattctggtctccacacatattgcaggtcacattcttgctgtacagaattcaggagcggatcagggctggaaaagtaggaacagtctcctcaccagtcacccaagaaggtataaactggccgctcaatgtgttttagactcatataaactcagaattggtagaaaaccaaaactagctcatctaaccaactgctcagtagagatgcctttgccaaatgggcatgtctttaagatataaccataggtatatggtgaagtctgtgccagagatttatgttaaattcttgcagattcttgtgtaggtgctctcagactggtctctaggaaatatggtaaatttgtttacagtaaatattggctaattgactaaaagtaaggcttctagagtttagttcctgcttcaaccactaactagctctttgaccttaagcaagtccgtttgcttctctgagtctagctcagtttctcatacgtaaagcagagataatactgctaccaattttggagatttaactaattctgccctaaaactcttcccttcaaaagcaatggtaaaaattattactggagcataagtaaatgtttatcatataaaggaaactatatctctagaaatgttatacatgtaaaattttaaaattctataaaatggttggtttcttttagaccttttagttttgtgatattttaatccagaaattgaactctggactgaagttcaccttctcttatttgaaaatttatatgaggttagagaggaggaaaataaactaaaaaatattatctgttactactaatcttgcaaggtatttgtggtattggtattcaaggagttaataaatatgaaatgcttagaagaatacctagcacttggtaaatgtacaataaatatcaactattatgagtatatgtactaaacacagcactaggttaatatctagttttgtctcatagatggatgtgcattgcttcctatgaagaggcaaaagtttgtactgatctgagcagctatatctgtgcctagagaaagaagctggttttaaaaccccttgtccctaagtttgtagtggaatgggataagtcatctggctcttatgctatgcctacccttcagatgacactatctcgctgcaacctctgcctcctgggttcaagcaattctcctgcctcagcctcccaggtagctgggattacaggcatgcaccaccatgcctggctaattttttttgtatatttaatagagatggggtttcaccgtgtcagccaggctggtcttgaactcctgaactcagttgacacacccgccttggcctcccaaagtgctgggattacaggcgtgagccaccacacccagcctatctttgatacattcagaaaggaaagggaaggaggcctttctcctcctacctcctgtgagtggttaggctgggttcataggaagctggccaagctcattagcatggcaagcccctccactacccactgctctggcctttagttgcatactggtcagtaagtggaaaaagggaagggggaggatttgaaacgtaaccacagcagggattcctggaggctgtgggtgattctttaagttggtgcttctctttagggcatagcaccaacgtcttcttgtgagtgtatcctaaaaagtgagcaggtggatttctgctccaagccatgatataatgacaaagactggatttaccttcctgccttatacagttaagaaccagacaaaatatatgaaacaacagtgtcttagtctggttagtgtcgctctaacagaacacctgaggctgagtagtttataaagcaaagaggtttatttggctcacaattctggtggctcagaagtccaagactgggcagctgcatctagtgaaggcctccctcatactgctcccactcatgatggaaagcagaaagggagctgggaatatgcaaagagatcacatgcgagagaggaagcaaggaccccagactctttctagcaacccacggctctcaaggggactaatctcttcccaccagagtgagaactcactcaccactgtaggaaggcactgggcattaatctattcatgagggatctgcccccatgactcaaacacctgctactaggtcccatctctcaacactgccacattggggatcaaatttcaacatgagttttgtcagggacacaccccatccaaaccatagcaaacaggttgcaaatattggacaataggtagcacagaacattgatcctcaagagaagaacaaacagggtgagccctacaattgctccagcccaccatctacagagtatatctagactgcagtgcagggagggccaactcaaacagtcctctggtctccctgagttgagatgaagttgagaattaggggagaccaaagtggctagaattcccagggaagaataccagaaaggagagcattaatggagaggagagaatattttataaggggtatctgagtgcttactgatcagagcatgatgtgaggaaactccctgaagcttggggaagaaactctctaaaggagcagatggagcaccctttggagctcacacaggaccagaagtagtgctgttgccaccagctggagcagaaaatcagaatatacagggcatccagtagactactcaggagagtattgtctcaatagtagggcaagattaaagagtgctgtggtcctgcctaacaaaacctaaaaacaagcttcaaattgtttacaaacacttttctttgtcccagaaataaaacacttcacaaatatttaaatgaatatcagatttataatatctggcatcaaagaaacatgagaaatatgacccaaaatggggagaaaaatttgatcaatagaaacatacacagatgatagaattagtaaacaaagacattaaaatagctattataactctatcctgtatgctcaagaaggtaaaggaaagcatgaaagtgttaagaagataaaaaaaaagataatgagcatcagacccaaagcaaaattctagaggtgaaaaatgccatgtctagaccaaaagcactctaggtggaattagtggaagattagacactagcagaagaaaagattagtgaacctgaaactatcgcaatagaaatcattcagaatgaatcagaaaaatcactgaagaaaatgaacaaagaaactgtgagctacaggacaacttcaagctgatggatatgtttgtaattagagttccaaagttatcagaagaagaaaaaaaataaaggtacaaacagaaatcagtgaaacagaaaagagaaaagcaaaagagaaaaatcaatgaaaacaaaaccttgttctttgagactattaataaaattgataaacctctagcttaccagagtgataaggaaccagatagaaggcacagattaccaatatcaagaataaaagagtaaatatcaatgatgttgaaaatgtaattaggaaatattatgaacaactttatgccaataagtttgacaacttggataaaatggacagatttcttcaaagatacaaactatcaaactcctgacaagaagaaataggtaaactcaatagccatttataattttttttttgagacggagtctcactctgtcacccaggctggagtgcagtggtgccatctcggctcactacaacctccgcctcctgggttcaagcaattctcctgcctcagcctcccgagtagctgggactacaggcacgtgccaccacacttggctaactttttggatttttagtggagatggggtttcaccgtgttagctaggatggtctcaatcttctgacctcgtaatctgcctgacttagcctcccaaagtgctgggattacaggtgcgagccactgcatctggcctgccatatgtcatttttgaaaattgaatttgtagttaagaatcttcccacaaacaaaaccacagatctaagatggcttcactgatgaattctaagaaagatttaatgagggactaattctgattcctcattaacttttctagattattggagagaaacatacactttccgtttcattctgtgatgttagcattatcctgatatcaaaactagaataagattttatgagatacctcagtctccatgaagtgcttatttcacattgcatgcctgtatcaaaacatatcatgtaccccataaatatatacacctaccattacccacaaaaattttaaaaaattaatttaattaaaaaatttttaaaaaattatgagaaaattaaattctttccaatatctcttatgaacaaagatgcaaaaaagttttaaagatttttttgtaagtcagattcaataatatgtagaaataataatgtatcatgaccaagttgggttaattctaggactacaaagttattttaacattctaaatgtaaatagggaccttttcctaaaaggaaaacattattcttctccatcttatcctcattgttgtagagcactgggttttctttcttactgtgatgggtaaggaaaggcctcaggtcttaggggatctgctaatgagctaagcagaaggtccctattcatatggcctcatatttgtcacccagagggtagcaacaatctaggacccagcgaccctcagaagtgtgtgagacttgggactagcggaaacagaatgggttttggagtcagaccttggttcaaatacaagtttcaccatttgttgaacaaattatttaatgtttctgagctttagagaaattatgaggattaaggccgggtgcggtggctcacgcctgtaatcctagcactttgctaggccgaggcaggggggattgcctgagctcaggagttcgagactagcctgggcaacacagggaaacccaatctctactaaaatacaaaaaattagctgggcatagtggcgtgcgcctgtagtcccagctactcaggaggctaaggcaggagaatcgcttcaacctggggaggcagagattgcagtgagccaagatcgcaccactgcactctagcctgggtgacagagcgagacttcatctccaaaaaaaaagaagattgttctgaagctcagaggtgagacacataaagcccttggcacatagcaagcatgcagtgcatggtggctgtggtggtagttcattttgttgagaccctgtagcatgaggtttaagagctgtgggtctggatgaggatagcttggattcgaacaccagctctgttacatttctgtttgtgagaccttgcctagtttcctagtctgtgaaataggattaacagtactatctatctcaacagagttgtgttgtagtgaagttcttttgatacatgagtagctcttagaatgatgcctggcccactttcaagtaagtgctcgcattaactattattttaatgctattatcgtttctctggccactggtgtggtcattactgttgttaacaggccagataagggtctgatattctagcaagaaatggtcctagcaagaaggattcacaaaccaaagtgaggacaccaggtaacagagtcactgagtgctcgagtttgctcagcctccagattttatttggctccgttgaaagcagacctgcctggccctgactcatcagagaaagctgaattgctgcacctgggaagagtgaagccttggcgggcaagggcagggcagaccctgcaaacaatctatctcggagacaggaatattttgttagagatgcgcccagttggggttgggccttcctgaatggtgatgggatgcagtgtgaatggagacctgggctataattgagaaccatgtggccatgtcagcaggtgatggcacttgagtgacagtatgacagagaacagaaacagggccacagctagccgctctgcctgccatagcgatgtacactgtgcagatttctacccagccaggaatgagccgggcctggagaggcctgccagacggtgggctgcatgctaccaatttctttcagcacctcctattttgccattcatagactcttgccattaagcagacagaacagctcatatcctgtggacagatgatagatatgtcatatcactgaaaaattgtttgtcttccacaggtgtatgggcttcttctaaagcaggcagctcacatgacacttttcaacactctgtcctgtaccagcttggcatccggcgtctatcaaaaggggaatctttcatatgcaattatggcagaaaataaaggtgatgaagtgttgtgtaccaagaagggataagatcaaagggcggtaatgaataccgattacaatagaagggcagcttcaactgcagaagttgtgtgtgactgtgtagaggctggcgctgcttgggggcatgcactggcacacaccagagtacatgcagaaataatacagtaaaatcataggcactgctgtcataaaattataaattgccggctgggcgcggtggctcacgcctgcaatctcagcactttgcgagattgaggcgggcggatcacctgagttcaggagttcgagaccggcctggccaacatggtgaaaccccgtctctactaaaaatacaaaattagccgggtgtggtggcaggcacctgtaatcccagttaatcaggaggctggggcaggagaattgcttgaacctgggaggcggaggttgcagtgagccaagatcgtaccactgcactccagcctgggcaacagagcgagactccgtctcaaaaagagaaaaattataaattgccaaggtagaccgtaacccaagaggggttacaggtaatgtgtaattgtatcaaggtgatggtaagacacttgtatcctgataattcacgtaatacctgtttcttccagcaccatccaattagtggcaccatttcagacctccaaaagtctagtttatacccattgaggctgattttccaatagagtcttccagagcacaggacctgggcacccaatggtgtgttgtttatttatttttttattgcactctgggaggccaaggggaaaagcacagcctgttcaagtttaggaacagggctgcgtatcattggagacttcacagccatgcagtgtcgccatcccagcagcacgctttttaatcggagaagaatttctctacctgccaagtacttttccttgcagctgctatcatcttgaaaggtacatcacatgatgacatttcaaatcccacaaaatggcttgcccaagtcaattcagcagaggctttaactttaatatctgatcactttctttggaatgctatatgaaaagctgacaattttcaactaatttgtgagtacaccagtttgagttggttaaaaaagacaaaaaaaaaacaacaaaaaaacctcttcattatagattacttaaaattcctttctaattgtattagtttcagtaatgatgactgcagtaatttaaaggaagctagcaaagttttgtcaaatgcctttcagggttcttgctttaatgggaaaattaaatcttctttatcagttgtagtaaatagatgctcaactctttgaaaatggctcctttttctaagtagataaaaaaaatcctgctttgtcttattttaatattggctggattagtaaccattttgctccttttgcaaatataaaaatatattgagagacctcccaattttacaagtaagaaggcctacatcaatgaggattgaggggagagggaaagagaaccagcataggttgaatgtctgctatcttatttaacttcatcttcacaaaagctgtttgttggagatgatagagccattttccagatgagaaaactgaaatgaagtaagctggtctggtctgtccagtggtgttagagctgaattgaaatcctgctttatagagcccccagattggcattccactacctttgctcccccatgctgcttagctcacattggctgtttgccataggctgtctttctctaaccagaagctgctggtcttgtagcacccagagacttgtgcaaatgtcttctgtgagcaattgtaattgagatttccaaatgaaatgtcagtctgctcaccaggggaatagtattacaaagccagtggcccttgcgataccctgtgttttcacagccctcagggccttgtgttgaaaatgtaagcaggcattgctaagaggtctcagtggggctgagtgagcaatgcttcttgcggggaactttatggtagaccaggccaaccatgatgaggactacctggccagctcagaaaggcttcttggtgcaaatctcactcttaagttcccagtgaagtcctctttgtgtcttcgtaggtatggtacatggctgtaattgaatacattaatcctgtggcattttcacccattagcactgcagcataagtccttagaaagaaccatgttttgaggaaaagtgggcacggggaagacaaattccaatataagaaggaaaggagagcagtctgcagtcaaagaggcattccagagggcactggatggtggtagggaaacagggatcctctgaactcagttggggtgaggaataggagaaacttccctacttgacaattttgcctaaggccagctctactcagtaagcctcctgggatcagcttgctcacttcaaaggatctagaccatcagaagaacaaaacaatatttccctctgtggcaatgtggcattgcagctgtcatcacaattgtatccagaaaagcagcgtattcaagtggcagcttgttccttgaggcttgtctcatctttgagaaatacccagtgacacctctcagaggaaatccctcattccagctctgtgtgatcgtttctgcaggcagcaagcactttaggaatatgttcctgggcataatgagccctccgatggtgttcaccgtgtttgttcacaagagaacccagccagagttttgtgagagaccagacagagcttcttgagcccagcaacaggaggcacagaagaatttctggttgtttccttagacttgtaagaactgttatttgaggacttcattgaaaccagtctttatgtccccaccctttccatttccttttccttttaacccacagactgctgttcactgttgtagaatggagttgatgactgattaaaaaaaagtttctgcaaccttccattgcatgaaaagaataggatgcaatcaaggaggggggggtggtggaggagtagaggacatttccctgttctctgctctccccaccttggacttacagaatcctagacctgaaaggagctttttttcaagcatgtagctggcctaattctcaaactgaacagatgaggaaacggaggcctagagagtggaggtgtttgcctcaagtgacactgatggctgatgaccagttccatagctggcatactttgttcagctctgcagacgatagtttaaggcaaggacacatgacaggaggatggctgggaggatcgggagcttatgacgatgttttgaagaacccaggactgtcttgtcggtaagaaagaaaatgcttcaagggattataaagaccatcctcaaacatttgaaccgtttccacactgcagcatagggagatttattctttgtaattgctaagggcacagctagaatccacggacatatttatatgaagagcgagtttgactcaagatgaggaagatgttgatctgccttcaatatgagcctggaatgcctgaaagagtagtgagtccactgccttggaagaaccaactgtccctcaaaaaagaggacatgttcaaagaggtttctacatggggaatctccttttcaaagctaaagtgaatcaacaagattctcatcagagtccctaagagtccccatcaaatagggaggtaagtggaattaatgaaaaacgctgaaggtatcagtttctgcaaagccagtcatctccagagcagtgtatgaatctagatctaccacaggctttggggtcgttagctttcgctgttgtggagcccagataggggatagctttgaaagtaagggctgctgctacttataggatgaaagtggaaatgcgttagtttcgattttgggtaaacttgatgatagggaaaaaaaaggcacccatggctgggatctctagttttagtccaaaggtggtaaatcagtcccaggatagaaagactcctgtgagcccagtagagaccaggcctcagaaaaagccatggccactgctttggaaaaaacttttttttttttttttttttttttttgagacagagtctcacactgtcaccccggctggagtgcaatggcgtgatctctgctcactgcaacctcccaggttcaaacaattttcctccctcagcctcccaagtggctgggattacaggtgcccgccaccacacccggctaattttttgtatttttagtagagatggggtttcaccatgttggccaagctggtctcaaactcctgacctcgtgatcctcctgcctcggcctcccatagtgctgggattacagacatgagccactgcacctggcctggaaggaacctttaacagagacttttatagatacctctgaggtttaaaggccactaaggagaagatccagggcactggaatgcctgaaccccagaatgggctgatgaaataaagtcccctttacccctggttccatcacactggcctgccctttgcctgttgtggcctctaacctgtctatcctttaaggttcagactcttgattctaacttgttatggctatgtatcttatttggaatctctaatgcttgaatctactgcttccagaaagctttcctggccttatcaatctaccctagagtctcctgcttctgagtttaggggtgggaacaggtgacaggcagtatatcaggacacaaggaggtctcaggggttaccctgtcactctgggtcgatgcttgggctgggtgctgtcagcttccctccctagttgctataagagtgccactgtgagtcttctcaaagtgtctcccgctttgctccctctcttttactgtcatgctcccttctaggatggacctggatccccagcccattggaataggctgttcccaagtttgggtaaacaccatgtccaagacacccttctccctttttgcagacatttcttctatatacatttctcaagggcccactgacctcttccaggctgatgatgtgtaacccaaagccttgagctcattctcactgggtcattcagtccatcctcccagaggactgcttcatcaattgctttgtttgtgcttttccccaggatctcagttggctttgagatgtttgactcatcgtcagtacttcccaatttcctcctgaaggtaccaaccatgtttgctaatttaaccatcagatatcccgtccgagttgctcatgagcatgagaaaacactaacgccttttttcccgtgggtggtatttgttggcttgtaaatctgaacaggaagagtacatttatttggagaaactatgaaatgcctacccttgaagagtgtttttgttgggggcagcaagagagtctgtatgcccataagtaccgggattcaggacttgagatcaggctagaggccagagataaggacctctttctaatctttgctgcaaatgaaaatggtcaataaatcagaactatttatggaatgcctaccatgttcagataacaggagaatgagaagttataaaaacaggcaaaaccatcttgactgaaaacttaacctaccacttgttggaggcctttgggactaaatctcacaggggtgcttgttgtctagaaattgagaacataatttagctcctgcttgagactgagaagtcctttgttatgtttattagatggggctgagttttaggatggcagaaatgcaaccttaactttctattcagcacctttaatgtatttctgctgaatacagaagacagttaatgtctctgaccccatttttttatttggagaaaagatctagcaatacctacctcaggctgtagttctgagaagtatattaagttcgttttcacactgctatgaagaagtacttgagactgggtaatttataaaggaaggaggtttaattgactcacagttccatgtggctggggaggcctcaggaaatcatggtggaaggcaaagggaagcaaggcatatcttacatggtggcaggatagagagagtgagggaaagtgccacacttttaaaccaccagatcttgtgagaactccctcactatcatgagaacagtgtgaggaaaaacactcccatgatccaatcacctcccaccaagttcttccctcgacatgtggggattacagttcaaggtgagatttgggtggggacgcagagacaaaccacatcaagaagtaaacaaaacattgtatgtcaggcactttgcaatgtacttggcacccaataggcaccaatgaacagacgatgctattgtagctggaccatcattgccggtgcctcctgggaagcagatgggaaacagtgttcatgttgtgtcctaccttgtcccatggaaaatcctgattttgagttctcttatctctcagattttatagtgttaagttagcacactgtagacagggtacatggaaaaatgtctggtgtccctgacacaagaaaagggacaaatctctctaagagagccatctggggtcttgtattgatgaaagcagtaaagaactgtggaaggagagaaaagctaagtgtctaaatgaagagtttgctacacacattctcaagggtgaagactggacaagacagactggcagaaggagaggagctaaggggtgatggtcccaggaaagaatggtgagcagcatcaagggtagtcaaagttgaaatagagaaggacaagccagttataaaatgagttgactggggcagcaaggctccaccttcttcccagtcagacatcagaacccatagcccagactctgcatgtatttaaagggactagaagacaatatggacccaaaagaggacagtctgcccatctttaggaaggagtcccctctcattttccttgtggatgctgtccatggaagtagacagccctcaactttcttcacagagcaaacttaccttcacctcagttgtgtgcctcacacttacatcagctcaaatagcatgaattctttaaaactacagaaattgttattgttacagcagtttgttcccaaggaacaaaggccacagcaggctggtattattttaatttttccatgacccatttatcaaaaataatgataagatttgaaatagatttcaacatggttaatgagatatttgcaatgcagtttatccgaagtggaagggcctagacatctaaactggttgtctggcaagattaaccttgtgtactttgccccatcttttgagagaaagatctctctaaatttcaaagaaaaaggcatcatttatttgcacctgaatggtacatttctgttcagaaaactgaaatcagctgcatacacagaacccggttgggacaacgtcaccactggggagagggtgagacaggccagatttatgaatacccaaggagggaataagcagatcaagatccatgtgggtacagaaggagatctaaatatgctacacttgtgaaaatttcatttgaataaggaatcaaattgcatcattttattttatttcttattttttagagatggggtattgctctgtcacccaggctggagtacagtggcctgatcatagctgactgcagcttcaaacatctgggtgcaattgttcctcctacctaagcctcccaagtagctggggctacaagtgtgtaccacaatgcctggctatttaaaagaaaaatttgtagagacctgggtcttgctctgttgcccctaggctggtcccaaactcctggcctcaagtgatgctccaccttggccttccaaagtgctgggattacaagtgtgagccaccccacccggccctactttatttattttttttttttttggagacggagtcttactctgttgcccaggctggagtgcagtggcacaatctcagctcactgcaacctctgcctcctgggttcaagtgattctcctgcctcagcttgccatgtagctgggattacaggctcgcaccaccacatctggctaatttttgtatttttagtagagacggggtttcaccgtgttggccaggctggtttcgagctcctgacctcaagtgagatgccctcctcagcctcccaaagtgctgggattacaggcatgagccaatgtacccggacccggccctacatctttttaatgttatgtctattctccttaagactgaagttctgtgtcttgctcttctggtgtatccaattagaagttgaagcaagagatgatcaattccatttaacaaaagaatagagaaaaatgtgtccgacacagcagttgctctcttaaaacaaagtgctatctcatgccttgccctgtagctttcataaaagtattttcaaagtctgcaaaaatgggcaggaaaaagtaatattctggaaaaagtgtatgaagtgggtaaggatgttggcctggtgggtctgggtatagagctaacactgtatagagtagaattttctaagttttaaagtttccccaattgccagagctcaagtatgtgttgtggattgcatttttccagattcaaagctattccctcctttaacattcccgctgtcttcttttcccccagtacgtgtattaatgacccaaacaagaaagacttcatgatggatggtgcttatttaattggccaaaatggaacgatgtgcactttcggaatccctttaattcttgagactaatctacatattggcaacttgtcataagaaatgggtagcaaacgctgaatcaaaactttttaggcttggcagcagtaaaatggcaatgtattaaatattctcttaggagactggagagtaaccattgtataagtgtaatgcagtcatggtaagataatggattaaatggcctcctttaggatattggctttgtatatctcatgtattaaaaaaaatactctttctgattttaatgtgtctctttaagcacacacaaaatggacaatggtcagtaatgagttactgcgttcaggatgaggggatgtttgcaacctgttctgtgcatccaaattccagcctgcctgtaggtttcctgctagagttcacaaggcttcatggctaaacttcctggtggggcttggaatgaaattttcccaggagaccacatggtgatttggaaccagaagagcttgtttacataagatcttctgcatgtaccagttgagagagattgggaaggccactgaaatttgtctctaagaaatatgaatgataatacttggtatttttctttcaaagagattgtgaggactggacaaagtggtggtttgaaaatatttcatatactgcaaagccttgcacaaatattgttattatgattataaaggctcttcctggtctgtaaaaaaaacattttcccaagtcctcccctatcttctatcagccatagtgaatccctgtctattcttagcatgtttgtgcgagggatatgtgaaagcgttggtgtcctcttgtccctctgttaaggactcagacaggatgccgggcacatttgtatccagacatcgttgagatgttttgaaatcggtctggtaagaaccaaagctatgtttccaattaattttctaagtacaaatatgctcaaagtacatttttttttaaaaaagaattcaacaataaagtatggcttgttgctgttcgactgccagaaactcgggatctctatgagtttcactgatatcaaaggcttctgtttaatataactttgtattaaagtgggccttactgtcaacctagcaaaacctcatgtttaatctcaagtttagtgtagtttttttattaatccaatgtgcatctgttaaaaataactccagataatgcaacatttgattaaatggaacttaatacagccattagctggtgggattttttttttccatttacgcattccaagctgagcctgataagatggcactaacatttagcctgaggtgtggaatgttaatagtgggatcttggacagtttgtttattttttatttatttcctgaatgtgccactcacagcaatgtgccagatgggcggcctggaaggcagaaattctctgtttagcctcggagccccaagaaactggcagattagcccccacccccagggcagccccagcttggtagaaaaaggcagaggggtaacattaaatcagagctgcagtatgtttttgttcttttgtcaaaggactgtgcaagtaacatgcttttcagggttggccatgcaaataacatgtcaagtgaaactttaccacctttttacttaggctatatagaaggaaggcctaaaaaatgccctggtcctcttgagcattttgagcccaggctgtcctggtggcaataggtttcctctgttgagaagtcctgcagctctggtgggttaggaccaccctccgcctggcactgagtgggtactctgtcacttcttggagccattaggctgaacagtagccagagaatacagaggccccattcattttgtcggtgcacatttattgggtagttactgtgtgctaggtaggatactaagccctgaagacagggcagtaaaaaagatagactcagtccctgccctcatggaactgacattctatctaacatctagctgctagttgaggatgctgcccatctctgctggtttgtaaaatttggtttctactctattaactgaatttcagctcactgaattagacttatgttccatggaccagttggtcttttgcaataattcttatactggtatttttagtgattttatgttagttttaatttcttcaagataaggattttggtttgatttgattcaacagttatttacaaacttcctattgtgtgtaagacttgacattcttcactactcccagcctctcccagggtgaagaggcaaaatgtacccccttccctcttgcctagcccatccaggaaggccgtcaagaaagggcaagttatataccacacgatgctgtcacatctaaaaggacactatccacatcacagagactgtaaatgtgtatttttatagtggtttcctgacagatgatgtgtcttgttctaagaaaatcattgtatgttaaggatattaagaaaatgtcccccatagcaaatgaaccttgaatcagattctttaaaaagaatcacattctttttaaaattagtataaagacactctgtaagccagtgggccccttgctcctttcctttcccttgtatcagggaccaggaccattcttctagttcattactgcaacagaggggaaaaatagtggagtcagagtggattccagttttaaccatgcaaatcaaccagctgtgtagcttcaagcacaacctataatcattttgagcttcaatttcctcatcagtaaaatggggattatccccatacctcatggagttgttaagaagatcaaatagagtaattctgggaatatgctctgctccatgtgcttgaactcaatggatgttatttcaatctggttgctggtatggggacagaggtaaggaagggaagtggggcatgaacctgccaagagacttgatgggagacagatcttacttctgtgtcctctgagtgactgggtgagttcgggggaccattttgtcctgggaaggctcatcactgaagacttgaaaacctctttcatttttagcaattcagagaaaggcattcaatttttttttattttcatcctggggattgcagtttacatgtgcaagaaaatgagggtgtcattctcctagttcccaggcacctaggctgattcattgcagcattaggagtggttaatggcaattgaagtagcagcagtttttggcagcaagcaggaccccaccagagaccctgggtaactcccaggtgttattgcaacctgtctggctttcgatggagctcactggttttcccatcaagctatctgccagtctcctgctttcatttcctgggcagagattcagaggtcagccggaaacccctttgcattgctgcagaggggctgatgcatccattgattctcatatttggttttgatcacagattgaaattagattgcttcctttcctggctgggattatgatagcactctgtagtttaagaaaatttattcactgtgcgttttgtttcttgaaaagccagataatttgtttctgtcctctactcaaagaaactcagtgaggactggccagactccaggagtaatgaggtgatggtgagaaaaacaccacccaaagacatgaatctttattagacccttcttgttgtgttggtggcaatattgcagtgcacaaggtgatgggtcttgatttccttctggcttgactggggtcggctagttccctcttgcggggcctttgtatcccagatggtggaatgtgtctaagtttggcaacccatattcacctgatggaataacacttccaaagtgtacatacaactgagaagatggagggggtttagcactcacgttctgggccatgtgtagatttgtgttttcattttcaagttgtcttcaagctcctctagggaggatgagtggatggaagggaatgttttatctgtatttgtagggagcttcctgagactccaaaggctggaatcctgtgactgaaacttgttacaaagaataaagtaatagagaggtgttcaaacccaagaggaggaggatggttcccaaaatttctcagttcttcataccctttgtttctcagtcattttttttcacaatgcctctaggcgaatgattgcatgtacacacacacacacacacacacacacacacacacagttctgtttattaagtagttagatcccaataagttaatttatgtcttaacagcttagtagccatttgaaaaaataggtatacattgaaagaaaatgtttttattaggccaggcgtggtgactcatgcctgtaatgccagcacttttggaagctgaggcgggtggatcacttgaggttgggagtttgagaccagcctgcccaagatggtgaaaccccatctctactaaaaatacaaaattagctgggcatggtggtgtgtgcctgtcatcccagctacttgggaggctgaggcaggagaatcgctttgacgctggagtcggaagtttcagtgagctaagattgtgcgactgcactccagcctgggtgacagagcgagattctgtctcaaaaaaaaaaaagtttttattcttaaataaccaaattagttaccagtgagatgtgtgtacctgttgggtactgcacagcatcacaaatcttggaatcaggttggacagtaccaccctgtttttgtgttccccactgattttcatgcagtacttgctttttatcacagcaaccactgaaatctcacttttgaaaagatatggcataatcagaaggaatgtagcatgatctaatgttgacactgagaactacattgacctactggtttgcagagtgacagatgtcatgtattgctgtattttccttgaaaatttaacatatttcaaaattaagttcaaattaatttaaatgtcccacagtgttcctatgtgtttgctgtggtgacccagggcccttcagcatacagctgggagcctagatcctgagcacaagatgctctcagataatccaaaacctggaggaaaggagtgcttgtctagtctcctgtccttatagtggctttcaggctcacctctgacccaccactaaaggaagatgcgccctgcacacagtgcatcaaattttatgattctagagggtgaagtgaaatctggctacgcaccgcaactagtagccctgcactgggttcctccttggtagccagctccaacaggtactgtgggacttgtttcttgtgctagcatagcctcgacctcaaggaagaagcaatcttggggagactgtcacaagctcaaggtggacaaagattctctgtctgaaggctcacaattcaaactggtcatttttgcagaatgcttctctttcctcggcacaaatgagagaaattgaactggattaagtaattaaacaatgattacatttaattaaattaggatttaaaaaaaaaatttccactcggatttttctaaagtggcatcattttcaagctgaacaagaatacgccctggaagtacaggaaaagacttctgtgcaaaattggcaacagaatccctaaatgcaagttctgggggtctagggattaaatgagaataatttaaatgggaaaaggccactttgcctccagtggaatgaaaacctttttcaaggtttacatttctgacaattttggtaaatcttcatgttttgatttgactgccagtgactggacattttcctttggaggcctagggcctgaacacattctgtcaagtttattatccaaggaggagattcctttcagtcccagatgggtgtgtggtagcaggtgggaattgccattgaaaagttgggagaccctaaatctcttttcatcagatctgaatgttggtggcaatatagaaatgcattgaagtgtttctaacaaagctgccctccctgcctagcattcagagggggaaagagggtattttgcaccatgacaacaggtgacctctatttggaattgtcaacaaacattaataggccttccaaaacacatacgctgtaatataagggattggttgcctgaagggagggccgggtattcagcagcactggggcagctcttacaggatgtcagcagacgtggttaattggtaatgattagggctgtctgcaagctgattccctaagtttggtgaacacataattgttgtatgtaaccccgagcggctttgctctttcatctatatgaagagatcagaaaagagagatttacggcttaggttgccccaagccacacatagcaggcttaattttcctttccaagggaatttgaagactgctgttgtgactagttctctgtggcttatatggtatgttgaggtcacctgcgagtttttgttaaatgattgattgactgaaattaattattctgtcagagctgtaatggcggtaagatggggtgcactgataaatacaaaagctaaagtgattcttataaatgcactatgtctctttctatttaaataaatcagacagaatacatagatcctggatggtgttgagtgtcccctccccattttcctctatagccctgagctgttttctttccaaatctgaagctttgaaatgagcggctatttactcaatttaactgcaggatatttgaatcctttgtcacttcattccttctaacctttccccaaacacctcagcccctgataagaggctgatgcccatgactgccttagattaaatcaactgaattgagagtctgtgtttgagctaatggctaggcaacttggggaatgtggctggtgagttggagagtggatagaaggcaggtgtttgcttctaaatgtcagatttctgaggcatggaaaccaccctgtagggcccttttaggagggcagtgaaagcagctgtttagtgacagactgtctgcagtttgggtccttaaatcccatgaagggattccagtggctggttaaggaaatgccaaaatgactctttcgattaccttgcaaagggcatgagattatttataagtgatgtatccaacttacttccaagtcactggaaacgatcgttagaaaaagccttttcccacacaggccctgatcatgacaaaggttccaggacatcttctgggagtggcaccaggttcaaaatgagcaagaacacatgggaggtacagaaaaagacttgtgggcaaattggccaagacagcagaataacaaacccaggtctcgcgtgcggtatgcctgtggggaaaacatctatggagtagggtcgtctagtcctttgtgtaagtgtgaaaaacttgttggcattggatagggtgatatgcttcccaagtctgttaccaacactcctaagttaaaagtaaacagcagtcacttgcttccttggttcttagattctagtgtgctcttttagaatattctagagtgcttgttaaatatgcagattcctgggaaccacctccagtgagtctaatttcttagatatgacacagagcttgggactcttcattttcttcagtaagttccatggtgattttggtgcagattgtcccaactgtccagttctttatttaacaattgatcagaccaggggccaagagaagaaactacagctgttccatttgacaaaaatagccctccaaaaggcctgcgactagtcaacatgcagatggaacttcttgagtttgagtaattttacgcatcttaagatcagccctggctatttcaatgccaatcatcttgaggtataccagctattgaatgcatggctccctgaatatctcagaaaatgaaatggttaaaataggaggggtattgaaaattgctgtttcttgttgatagttaaaatttcattggctggatgtgatttaagcagcaacataagattcatttaaactgtcataaattaagacatcctattatggagggaaattttttagaaatctttcccagcaatttctaaaaagagtaggactaacttggaactctttgtagtcattcctgctaaaggtaagaatgggcgtgctctctctagtctattaccctgtgatttagttaggtagagctcagacttgcactgctccgaacaatgtgttgtgaagttaaattgaaggcctgaaaaggtatgcatatatcccactactttatgaactctgtgactcataatgccttacaatatatttgaaagcaaattaaagactttataaaatgtttttaagtatgcccctcctcttttaaaacatttatggcttctataaatgctatataaaatgctttggagagtggtcatcgctggactaaggctaggttgcataaatatttagttagagatatgagcgtgtttcttgaagctgtacatgtgtcggagtttccttgctgttcctgcaaagtcaggcctgttagcaatgtgatggaagataaaggaagcggggagccaagatggaaatgcatatttgccatcgcaggggatagtgctccattaaagtatcactgtttttgtttctgtacttaaaaaatttaaacatgtctttgattgcagactgttttcattgtgtcattttaaataataattaggctccctgcttcaatcattctcttttaaagtgatttcggaagtccatgactggaaagatccggtatttaaaggaaaggcacctctgaggctaacaactggtggtgtcatttgaccaagaactttcccagaaaattcatctggggatccttaggctcttttagaatattgagttttgttttattgttatttttaatcccaaatacaccagatgttattattatcgcatatctctgggaagagaagaagctaagatgaatgtgcccttattttttatgtacttctagtagctgtgcaatcttcaatgacagtgaacagaatatatgcccatgaaactgaccagaaaacaaaaatgtgttgctgtctgcaatgtgccagtcactgtgataggcagtgagcttcaaaaatgagtaaagcatggccctagggagtcagagatccaagcagaaaattatagtaaaatgtgataaaatgtgtataaggagaggcctgcagcaggagaagctaattctaactggagctttcaggagaaatgatgactgtaaagtgaggaggtagaatctgtgtattcattatttagcttgaaagcactaacttgcgtcaacccatacttgatattttgatggtggacaaataatggcatttattcaggcagggagtagagccagtgcaaaggtacagagacttgaagggacaggatatagcagaaaattagtggtgtgcagtattgcttgagcaacatttgcaaggaggttggggttaccactgggctaagaggtatacagggactagagtatgaagaattttgagtctgttgcagaagtgcttagatttggcctgtttgtagtaggggaaccactgagttatttcggatggacaagaacaggataagatttgtgttttgagaaaaagtttttggaatcaggagcatctcaattgcatcccatgcccttggaaaatggaagggaaaatctgaggctcctaacacttctttcctgacatctgcttccattatttttttgtcatggggcagtcagggatgcctgggctctaacactgtttgggtatccgggtacacaaggtaggatgaagagagaaaggaatgaagagtagaaaaatgaacataatagaattatgagcttgaatctcacataggctcacatgtccaggcattattttgctgctttgataatacttgtggcacacatgggaatcctgaaaggtgcaaagtctcatgttggatctgtaagatgtagcttcttagcttatgaggcagttggaaaacgttaggctttgttctctccagtgcttaagttattcactggaagtgctctagctaccatatcaacctgtctctgcagacagaccatgggtcagacacttggatggaaagtccaatatgtgcttgatgatccagaaaggagttatatgaaaaaggaattttttatcaaaaggccacaaaatactctatcaaacaaagtcaagcaagcttcctttctttgcagcttctcaagcctttaatgttccaaagtacaatatgaatctccaagacaatgatggaatgtgtcctaattttatataatttcctaaaattatttgtgaaaacttatttttttctacaaagcatcttgtgaaacttgtgtttcctgggatgctctttggtcaaagccactcttgagattcatttttacaggcctcctaattgtacattgaatggaattcccttcatcaaaagttgtgcctactcagttcctaaaatgccagagggagtgaaaaccagaccattcagcaaaaacaaaaggtgccccctactaataatttgacatcatgttggtgaaacaaaggcttgcattcctcccattctaactggttgcttttgcaaagacacaacttccggttctggtgggcagaatggggtctgttgggaaggttccagcaaaaggcaactcttcttgaccttgtaccattgaaagtcacagagctattaaagtagcgaccagggcattcagaagagctgtgactaggcataatgtgccttttgagggtgaccattcatttgtccatctaattagcactcagcacctttgattgccccatacatctttaaaaaattcaaataggtagtgaaaactgcttggattgcagggctcagatgaaaattgaggcctggccttgtatttatggaggtttcttctttccaggacgtcttacctgtttccttagccctgttctcagtaatgcctgccacaaagaaccccataaatttagcatttgcagctataagtttgtcattcttttcttgaaataagataagggtactattataaaacagcagaaggctgaatgtgagagcagccgacatattgttgactgattcatctggggcatttagttcttcaaaatggaaaaacaaaatagggtctaaaaagcaaacacagtaaattaaaggaatgttattctatgcatagaacagctgttttaatacttgcttggtagggtcatgtgactgacccacttcttttaggataaaatatgtcttcctctaaggttattattaaagacacatggagacatttactttggtctccttgtcagcattgtgccacattacaagaaaatacaaaacaccatttaaattgggtttagatccttcatttgcatgaaaacgatagttaattgtgtccctgtgatgataattagtgttcagctaagaggaccttttcattgttggcccgaggtgaggcctgagttactaagaattgtactggtggtagctgttttcttttaagtaactgcacagctctgtctgttttgccaactggcaaaatgaattaacaggaagtgaaacatttagtgtttacatgagctaggacattgttacccaacacaaggagaaagctcactttgggccttctttggttatgggatgcttattgtctaatttcttcagcaaacatggagtacctactcaatattaggacctggtgtgccctgcacaattagaagctctcagagagcagggactccacagtagcataattgaaatctctgttcactttgaatcctgaactagaaatgttctcacccacctgaggcttgaccatgttttcagagctgccacgtggcaggaaaagagtccaaatctgctccttctgcagtgatctctccctgtgctacttccttacactgctttgctctgtaccagccattcaggaagatttatcaagtggctagttattatagaacaggacagaatactgggccagatcccccctccatcccacttaactgtgccttaatcattaagtgttctccagttgacctctctgtgaactcctaaaaggtcaagaccaattctgtttcaccttagaacatgcaattctgtagtgcattacatgcatgcaattgcattatatccaacgtgtaataaatatgtgctgaatgcatgaatgagagaatgaatgaatgatcttgccgtatttcaacttagcacagggtccattctctacctttgtgacatctagctacatcttgcgttgtcttctggtggtagggtcctggctaccttatggtgcaacccttttctctatgggcaactctgactgtaaaatggtcctttctctttttaatatccagtcagctgtaacatcacggggtctacctcctgaagccatgtggagtttggtctgattcctctttcacataattcttcagctattggaagacacctggtatatgtttctcatctccatatttaacataacagtttcctcagttggtcctcatatgacatggttccccaatacatctctatctttaatgctttcatatcaacatagtaatttaaccagtggtttaaaaaaattattttattttgttttaatgagcgtggagccagaactgagcatagtatttcatgaaggaatgatcagggcagaatagatacagatcattgccttcctccatctgaccttctgcttatactatttttataattggggactgtacaattcattattttattgcatttcattttcagcagtcatgccattgaattgattcatacaaactagcggttatctaaaccagtggttctcaagtgggggtgatttttatctccctggagacagttggcaatgtttggagaccttattgattttcagtactggcggttggttgtgacactaatatttagtgggtagaagccgtggatatggctaaacatcctacaatgcacagggcagcccttccacaataaagaattagctgtttaaaatgttagtagtggccgggtgcattggttcacacctgtaatcttaacactttgggaggccaaggaaggcggatcacttgaagtcaggagtttgagacccgcctggtcaatatagtgaaaccccatctctactaaaaaatacaaaaattagccgggcatgatgacatgcacctgtaatcccagctactcgggagtctgaggcagaagaatcgcttgaacccaggaggcagaggctgcggtgagtcgagatcgcgccaccacactccagcctgggcaacagagagatactccatttcaaaaaaaaaaaaaattgttagtagttccactgctgagaaattctggtctaaactacacagtctttgtccttggggcctcctgaagtagaccttgatcccaggctacatgagatcttgcaaatctttaaaagtgattcagtaggaccatgtccttgtaggtgaagcttttccaggccctctgtcaaccatttcttccaagacttctactttcttaactttctggtcacccaccttgcagttagagcagtgctcctgggatggaatgctttggttgtcatctgaagcctaggacagtgcttctcaaactttactgtgcctagaaaccacctggagattttgttaaaatcacattctgattcagtgggtctagggtggaggaagactgcatttctaaaaagctcacaggtggtgcctggggcagaaggccagtgggccgcactttgaggaggaagagtcttagcatgttttctcttggcattgtttggacaaaggctttttccattcccttggagcagagtgcaagcctcttatgctgggaacctttgactgtcacactcagccctggccatgtgtcaggacagagtagttgagcaccatgatgttataatgctgaagaagactaatggcctgcttaattgctgagcagtgtttataacttacaggtctttgcatcgccctattctaggttaaggagaaacaataacaaagcgatattactctcctaattgaaagttggagggtggaatgaaggaggagctgcccccagtcacagacttggaggaatgaactatccagttgtgagctggtttctccagattatgcatatgtttataaattatcctaggtgttctttttcctcattccttttattgtagagtgtatttctttaaagtgacaggttttatttttttccccactctgtgcagatttcgaggatgatgtagcttaataaatcaaactgatttctactattgtatgaagactccttaatcagttctttgaattaatgcaatcaaatggttgaattcttacattcatctctgtatttatggctctgttgtgcttttttattgaattggaagaggaatatcttcattcacagccaaaataaaataaatctaggcaggttatctagtaaaatgactaaggtatagggtatgggatgtgtatgtgtgtgtgcacttgtgtgtgaatgtgtgcctaaaaatacagatgtcatctgtgtcgttctaatattaaattttgttttggaacttcatattcatgaagccagcattatgtcaaactctgtgataatggtcctgtttttaccaggtcatgaatccaggggttctcaaacatgttcaagaagcagggcatttgaaaattatggtgtttcttgagtgataccatggatttcatatgccccggtttaagggcacaggctctagagttaggcaacctagaggaattcccgtttcctccatggactggctatgtgaccttgttacttaacttctctattcctcctttcccttatccttaaagtagggataatactgaagtgtctatcttgcagaaccatgctgaggcttagaaccacaggcatttacttgtatccttgacacccatgcagcaagtatgtgctacgtggagaccattattagtattaacccaaacttaaaacggctaaatatagcattttctgccaaatcagaaatgctatcttatggcacattctctcagagacaatagtcacaggcactgaggatgtaagaaaaatgattagaggacaataataaaattgaaatagtgctatcctttaacaaattgggaagctatctccattattgagttttaatccaggatcttggcagacacaggagtttggctgagagagtttgtgcattagccctaccctgctttttcacgtgctctgaagcatcctgaatctacaacatgtgatgcacattgaaacctctttctttctgattttacaatatcagtatggtacaccgatcaattaaaaatactttgtaaacatatgtggagtaagactccacttcaaaaaaaatttttttgagacagagtgtcactctgtcacccaggctggagtgcagtggcacaatcttgccttactgcagccttgacctcccaggctcaagtgatcctcctgcctcagcctcccaagtagctgggactataggcgtgtgccaccaagcctggctaatttttttttatttttagtagagatgatgtttcatgatgtttcccaggctggtcttgaactcctgaactgaagcaatcctcctgcctctgcctactcaagtgctgggatgacaggcatgagccactgcatccagcttagacctcatttttaaaatatggcaggcatacatctgaatgtatgcatgtttaatggagctaatgatagaaacgttagagagtgattattctaattactaaacaattcacaggatttcttaccacagcaaatgcctttcatgtctactttttgccagtttataatatggttcacaaacataaaagttctctgtcttaaaattctgatgccattcatcgatctagttggatgagtttttattacttgcataagaggggattggggtgggatggtcatatgggtttgtaggcatctacaaacagcatgctgtaaagtcttatttcttgagttttcaccagtagcaatagtcttattgctaatcgacttcatcataaaaattgtacttgatattggatagcatgccacatattaccaaccactttcacgtgtatattttttctttttctttttcttttttttttttttctttctgagacagggcttagctcttgttgctcaggctggagtgcagtggcacaatctcggctcactgcagcgcctgcctcccaggttcaagctattctcctgcctcagcctcctgagtagctgggattacaggtgcctgccaccacgcccagctaatttttgtatttcagtagagatggggtttcgccatgttggccaggctggtctcaaattcctgacctcaggtgatctgcctgccttggcctcccaaagtgctgggattacaggcgtgagccaccatgcctggccaattttttttatttcgtaacgcttagtgaccccatattattagtattattatttttatttatttatttatttatttatttatttatttatttatatttagacggagtttcgctcttgctgcccaggctggagtgcaatagtgtgatctcggctccccgtaacctctacctcctgggtacaagcgattctcctgcctcagcctcccaagtagctgggattacaggcatgcaccaccacgccagctaactttgtatttttagtagagatggagtttcaccatattgtctgggctggtctcaaactcttgacctcatgatccgcctgtcttggcctcccaaagtgcagggattacaggcgtgagccccacgcccggagtggccctatattattattgaagaaagatacagagagctgaaatgatttgtcgaatgtcacatgacttgtaagcaccagagctaggtctcataccaagttctgcttcttccaaatccgttgtccagcttgttgggtatgtctgagtccctgttagccacaatgccataattgttatagtgttcttagagtagagctcagagcctattatgttgcatctgtatctcatcctcacctcttcttttgttggatacatttttcatgatttgctgaggatattgtggacttagtgtcaaatatttttcaggtcagaagttttgtagcccttggaaatcaaccaataacctatgtaaaactggtgccgatgtttctgctgagagcttcagaactgctatatcaattagcttttgctgggtaaaaaactactccccacaattagtgacttaaaacagcaaatatttctttagttcccagttgtgcagattggcagtttggactcggttggatggttctttgcaatcagagcggtcctggctcttcttggctggtctttctcacaggtctttggtctcagctggggaccctaggatggcttatatggctggggtctctcttcatgtggcctttcctttttcagcaggttagtctcagtgttgttcacatggtggcttcagagttccatgagcagcaaagaacaagccccgtacctttcaagtctgattctgtcacgttggctacttttttattgctcaaagctagttatgtggccaagcccagagtcaacataagaagggattgttttggcgagaaatcaccagggacacagatacagggagatctgaacaaattgagagccattaccgcaacagtctgttacactgccacatcaagttttcctttccttccaaactttttgagtgaagttctaatgccctgaaaacccaggagatactttctcttcactgaggcatttccttccctgacttcctccatgggacagcttggcattaatgaattgaaagattgtccttagtcagggcttttctgacttcttaatggtgtgcatgtaacttctccttgtcaggtttccctttagaaatgcatgcatttatttggaatccggatgctggagttttctgtttggaaaagaattttaatgaaactttatcaggtgtgtgttcaccaaaatgaagaggactcttttgtgtccagagaaagctatctggcagtcaggagccctttagaaaaaggactgcagaatgaaggaaagctaaacctctctttaatgattttctctttttaaaacatattactttgcatgaaaatttgtgtcaaggagtttagctcatggaaggggaacttgatgtgcaatctggaggaaggagcggacactagatgataattctcaagcagatgaaagagaatatttcacattgctgagacacatgtgacttctttggatgcaaataacagaaaggttgatgacagttatccctgttccctgctctgcggagaaatcaccagcttagcaacactaaatggcaaggcatttgtggctgagttctttctctgactaattggaaacacatctctctattttcctgccattgagaaagagctactctttggtaaatggtattcagtggtttacttttctaaaaactcagccctgtgctgagcttttggtcagaagaatggaaatgctttctaatgccagagagcatgagtactttttgtggagacagtgggatccattagaaagtgactggacattttggagtcccaacttggtagaatctcacaagttctgctccctgtgagttcaacaacttgaacaaatcccttctcttctctggcctcagcttcttcacttgtaaaatgagaagaatggagcaaataatttcaaagggtttaaaaaaaatgtttttgaatagagactgcgtctcactcactgtgttgcccaggctgctctcaacctcctgggctcaagtgatcctcctgccttggtctcccgaagtgctaggattacaggcatgagccactgtccctggcccaaagtattttttaatctctgtcaggtcagactataatttggaaaaatatatatttaatttttggttataaatttaggattttgagatttggtgattcggagaagacattgtgaaatacttactgggtttatggcagaggacactttgtaaaacaaaacaaagcaaatctctattcttgccctgatagggattgtgccacccatctctccatgtgcccgtccacccatctctattccatgtgcccgtccacccatctctattccatgtacttgtccacccatctctccatgtgcctgtccacccatctctattccatgtgcccatctacccatctctatttcatgtgcccatccacccatctctatttcatgtgcccatccacccatctctccatgtgtctgtccacccatttctccatgttcccatccacccatctctatctcatgtggccatctacccatctctccatgtgcccgtccacccatccctattccatgtgcccatctacccatctctattccatgtgcccatcccacccatctctattccatgtgcccatccacccatctctatttcatgtgcctgtccacccatctctattccatgtgcctgtccacccgtctctattccatgtgcctgtccacccatctctattttatgtatccatcaacccatctctccatgtgcccgtccacccatctctattccatgtgcccatccacccatctctccatgtgcccatctacccatctctattccatgtgcctgtccacccatctctattccatgtgcccgtccacccatctctattccatgtgcccatccacccatctttatttcatgtgcctgtccacccatctctattccatgtgcccatccacccatctctccatgtgcccatccacccatctctattccatgtgcccatctacccatctctattccatatgcctgtccactcatctctccatgtgcccattcacccacatatccactaccttcttattttcttcatttgttccagacattagtgttaaggtgcttaacttctttaatttatccagctcttgcagggaaacaagacacagtttttaaatagcaaatgaggaaagtgaggccacaaggttatatcatttacccaatgtcctcagatggtataggggaaaattacgactaatccccaattgtaggtccagggctctttccctaagatacaacacttcttttgtgcctcttctaaaatgtcctagaaaagccagaacctgacatctgtttcttaagtttggggtggcccaaggtcccaatctagggcttaattgttgaatgagaaagaaatagggttatttcctttccggaagaatgttatttgagctgccatcctccaccataaatgaagatggtaggtttttgagcactctgtggctagaagaatgatgaacattatgagagatccagaaaaatcaggagaatccctggcttctggagtttactggcagagtctgatatgacagtgacatactcatgacatcacccatgacagtgatatatttgacaaatgagggccccacataataagtagtcattttcatagtacttaagaaaagggagacagaggcccctagcaaccgtgggatcctctaactgccagaggtagtagaggatgcctaggtcccaagagcgcacttaaaaaagagaggaaaagccacttcttcctaagtaactttctctggaaagctgtgatgtccctccagaggggcttaggacagaggttgttggacccggaagagcatatttcacctaaatcttggggtgaaaacacagaccagatggggtgcctcttctgtgtctctccatataaagaaggatatatcctgggtttcgaggtggattcaattcttaaaacagaccccatcatccaccccaggcaattttgtttgatcccaagttcagtaatgtgaagtaaagtttcccagactttaatggcttaaaatgaaagagaatcatgtttttctgtctgaaactggaaatccaaagagttgctcagtgagaatgttcagacttctaccttgaggctcagctacaggaaattgggaaatttgggtcagatgtctcattcacattccaaattgataaagggtgggaacgtttggagaattgtctgaatcataatgctactgagaaagttagaaaatataggattattattccctaaattacttttctttgtgggggtgcggggtgaaggggaggaggttgaggagaaattgtcagtatgctctagatggcagagagtggtgtttcatttagctattccagtgggtggattgtaccagtgtagagatgctgggccttcctgttgtgaagtaactcttgggggaagttggctggtggtaggatatgcagatctttgctactgaaaatggggtctttgggccagcaacattggcatcaccagggagcctgtcagaaatgcagaatcgttgaggccaccatcccagacctactgaattagcatccaccttttaacaaaacctcccagtgacccatacgcatgggaaactcgagaagcattggcctagataatcatccactgggacgatgaaaggcacacatcctctccttcctcccgtcgatcaaaagacgcatctggattggtttcttgattttgtcgatgatgacctaagagaaagggagtttaacctccaggagctgaactcagcagtgggactgtgctgcctcatctccagctactaaccgttctatccaccctgaccctctcactgttctcagaacaggttggaacctcttacgacgttgtgcttgtcccactgcctggaatgctttttctctctttcctcacacatcaaactcctgtcacctttcataagcttgctcacatggcatcttttctgggaaacattcctcattttccccaggtaggattaggtactgtaccttctgtttacttatgcctctaataaattacagtagtacaggaaagtatgcatgtctgttttcctttctggactgggaactcctggaggatcttacaccccttgtgatcacctctgtgtcctcagcccctaacacagagcaggcatgtaatccatatctgttgcatggctgcatgaaaatacaggtgaactggctgtgaatgccttttgtgggactctgggaagttctcgttcttccaggcagctgtgtgggctgtgttaatcataaatttctggatccatgaggctcccaagttaaagactgggtcagcactgagcaaaattgtcaagggagatgggactatccagtaaccactttcccctctcatgcctggcatacctccgattgccccagactttcatgcagcccctgcactgaggttggttccctgtggctaaattccacccctcccaaatcagagcctacctatctccttaaagagtcagtgcccatttgtccggggcttgctatgcgccaaacgctctacagaaactgctttgtgcacatcatcgcattcagtggccacaacaattctgtaaacataggcgtcatcatttccatttcatatggaggaaactgcagtttgtggtggttaagtaatttgctcacagcaaggtggtcaggcagagctgggattcaaactcaagcctgtctgacttactaattggcactttgaaatgctactctgtgccacaacaggggtaatgaatcagccggggaaacccatgaaggtgctaacctaccattgtacataattgatcaaaacacttgctctgaacagtgagctgttttagatacactttaccagggggaagagaataattacaagtgaccgcagtagatgcctctatctggtcgattctgactttctcaagctctgactagcctttaagacattctgtttctaagactgaggaccactgccacaagtctcagctagttcagggatcctacgtctgtgaagccctgggaagggggctgggagtgtgagctgccattttgcctttaactttgtcctgttagttgagaaacatgccacattattactgacttaagtatttatttttggttgggggatggggtgattttttaaaaaacaatgcccagtgtgtgtgacttctgcacatagtcatgtgagtcacttcctgtttagtggaagccctctttatccacccctacctatccaatgggatcatctcgccttttccacctcctctgtcccctccataaaatatgctcactggtggtcgggtgtggtggctcatgcctgtaatcccagcactttgggaggccaaggcaggcagctcacctgaggtcaggagatcgagaccagcctggccatcatggtggaacctcatttctactaaaaacacaaaagttagctgggcgtggtggcacatacctgtaatcccagctacttggaagcctgagacaggagaatcacttgaacccgggaggcagaggttgcagtgagccgagatcaggccactgcactccagcatgggtgacagaacgagactccatctcaaaaaaaaaagtatgtccactggtgttcctgttcccagtgagaaggcacctccctctagaccttccatactcagctgctctcaccaagatgcagttacgtttattcccaaacttgtttatgccagtttttcttgtacaagattggtaaacatagttcaattaaatattatataaaccaacgaactatgggtacaagactaaagagctgtcattttatgatcactgagttaaatgctttggaaaaatttcataaagcaaatgttaccgagtttttttaaaaaaaggaagccaacaaattatatgagagcaggccaagagagcttaaaacaagaaaggcagaactttatcatctaaagtagcctgtgctcagtttgcctttcaagggtctttatactctgctccattttaaagaaaccctaaactggaaattggcggggggcaacagtttatgagtattttgggataaaaactatgaagtgggactaatcacagggcagccagcaaggaaacatggacctcaatcccggagcccagtggaactgaattctaccagcaacctgactggggctaagaagggacagattctaccccagagcctggtccagccagcaacttgattttggccttgtcagactcaatgcggggaaaccagctgtgcccactggcttttgaccttcagaaataggaggaaacacatgtgcattgcattcagcagtgaagcccagggtaatctgttagagcagccatggaaaaccaacccagcaagcatgtcctcccctctgcttgtgcctatccagaccaccaatcccatatttttcccaggccctttcaccacactctgctcagtatggctttccaggccctcggcactggtgttgcctcagctttgcttttaaaacttgcctttccgctgggtgcggtggctcacacttgtaatcctagcactttgggaggccgaggagggcggatcacctgaggtcaggagttcaagaccagcctggccaatgtggtgaaaccttgtctctactaaaaatacaaaaatcagccaggtgtggtggtgggcacctataattccagctacgcagcaggctgaagcaggagaatcacttgaacccaggaggcagaggctacagtgagctgagatcacacccactgcactccagcctaggcaacaagagtgaaactccatctgaaaaataaatgaataaaataaaaaaaaacttgcctttcacacaaactgtctcccctaataagctaaggagagtcactctcacctaaaaacagactgtgcttccgtgcctctgagcatttgctcagtcctgttcccctcctcacagcctcctagatacatctgactcatctttccaggcccagctgagacccaggcttccctatgcaggtcgcctccttgtgtgactgctgtggcctgctgagaacttgctgctcatgtttccctctgggccttcgtcttctgttgggggtgttttcttctctctctggattgacggcataagaattagtatattgtacgtgatccatggctcctgtgagggactggatgttaccatgatccatacaaacacctgcagagctcttttgtatgtagtggttgatttctggggtccttgctttgagttatctctccttcaatatcaagataaggatttgatctcttctaaagtgtcttgtaaatgacttctttaaatgatttttgttccaaagaagggtgtctctctgaacatggagccagcccctcggatttgtggctgcttccattgctgatgtatcacgtacaatcctgtatgaacatccattgtgtgtactctgagagagtgtcctatagcaccagcacatggggacactatccagggagagatggcaggatgctggggtggggagtaggagccagggaatattttgaaagcatttgacttattttccactgtagctatctattcttcattccatgctaatgggataatttgatcaatgaatgaactgggaaaaggcaggagatgcataaaaagtgtaaaagcgcatagctacaaatgagtgggcagatttaccaccttctccccagaatcagatctgtctgccatccgcaccgggaatgagacaggcagatccgagctttggcttaattacacataatttgggtgacagctgaaatgcaaacctaaacattcaatcagttaaaaatacacaaaattaagcatttcacacagtgtccaaccccttcaatctttattaatactttaattatgttaattataccatggtttcaagccctgctactacaacaagcagggggtggaggtggggaagaggcagtcctcgagctaaataatgattgcattcgaattaaaagtaggaatggaatgcaaagtagcaaagaatcacaaatacataattcagcagtttacccaccctgttcacacttctttttttcctgcctggcagtgtttctgaagggtgggtccaagtctgactcatcctctgagtgtactgtacatagtaagtgctcagtaaacatctgttgaattaatttttcatcaaggatgctgaaattgtatccatagatataaaaagatgtgagcagatgtttgggatatatatattgaaatggcggtggccaatattatggctgacagttatttgtgggttagtgggaacagtggtggtgcagggggtaggggcgagaggaagaaagagaggaacagaaaatgaccaggattgcagagattcatcacccttctatgaagtcacttgatttctttggactcagtttctccgcatctctaacaaatgaggaggaggagattagaccttaatggttatcaaactttgttctcctggattcctcaaaggaacatcagggactccactgcgtatgtgtgttggagggacatctggaggataaggttctgctttaatttatttattggatgtctaagagttttattctaaaagttgcttaaaaatggtttggaaacttctgcatgtgatagcctttttaacctctaactcacccactcacagacagtctcctgtgctctggttggagggtttccattggtccaacacttcacctgtcttgtcctttgtcctgggtatgtgggtcccccttactcatctgcttttctagcccccatgtgattttacttttcaccttccatgtctttgctcatcttgggctgaaatgtccttcctctctgtctgcacctatcaacatcctacagttcactaagcctggtacccagttgcctcctctggaaagacttcctggactgcacttgtcattggtgctctctcctctttccagattcctttgattcacagtgcctgactcacattcctcctttttttcatatgtgctagtcttgtcttattgactagataatcaatttctcaaatgagaaacattcagccttctcttgagtctttcttccactctgccttagactggacacataggtgactactcaagaagtcttactacacatccaatagcatttgacagggagttagccacataaaatccaatgagcctctagccagagagaattcagttgctgaaactacaacaatgaatgactgtactttagattttttactttatagtttgctgagctgaaaccaaaatgtcacttgggtgacttgcacaagataggtttttaggttttgctaggctgacatgtacagaatcatcagttgttgggagtgtctttttaatatcaacagagaaaaccttgaagattcataaatctgaaatagaaatgcagtgtttgcttcaaagagcaattccttagtttgttgttggtgagaactggctctgtgactgtaccttttgcccaagtatccttagctaagctaaatgtcttcagagtctcacaaatagttctcatattctgtggttatcactactgagattctccctggtgcacagaattgacattggagctctccatgtagtttttggtggccggctcaagttgctgtctcatcactccttaactctacatcctacaagtcaccaatgtgggggcaaaggttcaaaaaggaaccaattcactagcttcttggttcagcaacaagactctcagcatcacagaatcttatagattatcaaaaggaaacatagcccaagtccattaacctacaaatgttgactattatttaaaaccaaactttattacaatggagaatacagaattaacataggatacagattttgcactacagatttttctttttgtatggtgtgaaaattaaaacacacacacacacacacacacacacacacataaaaaaaaaaaactatagagaaatataaaaaatgaccaagtgctaactatggttcccaggtactatgagaatttggaaagaagaaaaatcattatggaaaagtagaaacagctaagttgttgggtccatttttcacactcaaaagattttttttctaattattgcttctactcctgggcctcccttttttttggaaggaagtgtctgccaaggtacatctgctgaacaataattcattcacaccccaataaaagtatgaatattaccaatcagccctcttgcaaacaagaaagagataaccggatgtccacactgaactaatgataatttcagccaaaaggcaaagaagcttcatgtttttatcagcctttgtatcttattgcaagtggatgcattatttgttgtcatttgttggtttcagatattgaaattagctttcagaaaatctgtgtactacattgtggggaccactaagaatcttccacatggattgggaatcctgtgccaaggagtttgctcataatcatggaagaagatcaagatcagtgtaggtggaagtgacttggatcttgcaataactagggcttggtcaagcaatgtgggggtggggggatgtgccaaggaatcaggcaatgtccataaattcagtcccttttgtgcaccattgctgactgttccaaggccacacatctgacttcccattcctcctaattttgtgagctcgtactccatgagtgggagaagatggatcaccattttgtgaactgtgctgttttgcatctcaccccaaaaacgcatcccaaattgagcatatgtgatcttcagtaacattcaggaatttcccatcacttgaagtctttagttacagccacaccttttaaaaacaaaatagatgattttgaggatgtcattggctaatttgcagacctgctttgcattggcatctagaccagtgttcgttactggaggcacatctctctgtcgggtgattcagactgtatatgagattggggggtgtaccttgaccacatcaagttgtgaatggaagatgctgccttggtaattttacccaagaccctggttgtatccatttaataaaattagaacatgtatcatttgagaagggaaagtaattatctctgttagttgtaatctcctcaaattcaaatgcatgacatagagatttctcttcaatggcacagttatagacttggtggttaattaaacatcttttctaatcaaattagctttcatttcctaagtggaggtttttaacctggaagtggctttgaaacattgtttctttcagccatcacctatgaaaggaaagataatgtcccttcaaaggactcctctaacagtgaataattattctttgtttgactgcaaatgcacattcttgaaataatatattcgtaaagtttcataaattatttcaagacatattaaagagcattggaaatagttctactccctccaggaggttgccaagaaaaagttttgtcctttaaaatttgaaacaaattattattcactggggggacatcattggagcttcccctagctccagctgacaggaacaatttgagctaacctgttaatggtaatgcttttaaaatttagagatactcttaagtggagcaatttttaaaaattaaaactatagctagggggaattgcctttggaggtcatgcaatgttagggacactgcacatctacctggatcagggcctggattccagctgcctgggttgcatgttacatcatggcccatggaggtgagggagacaggagtgtctctggttgaatttcaactaaatgctcccaggcataattctcctgagacttgcagcttggctataaaatacagcataatatagcacaaaagctactgtaattggggttgggaaaacggagttccagtcccagaagtcacataacgttgtaaaaaatccactattttctcatctgcacaatgaaagaattggcttaaataatctcccatatcccttctaactccaacattttgtgcttttactgtaagatgtcacttgaaccaaatttttttttttttttttttttttttatgagacggagtctcctctgtcgcccaggccggactgcgtccgcagtggcgcaatctcggctcactgtaagctccgcttcccaggttcacgccattctcctgcctcagcctcccgagtagctgggactacaggcgcccaccaccgcgcccggctaattttttgtatttttagtagagacggggtttcaccttgttagccaggatggtctcgatctcctgacctcatgatccacccacctcggcctcccaaagtgctgggattacaggtgtgagccaccgcgcccggccgcaacatcatttcttaatagctcattttgtagcttacctggtaagtgataactacatttctgaagacttattgactagatagttatggcatggaacaagccttatatcctcatctgaactgaaatctctgaggaaaacaagaaaacaagaaagcaaaggagaccagcacttgcttgggcactcacaatgtggcaggagctgtacttggtgattttggggcttttgttttctgctattggagttgaatgaagtgctgggaacagcagaactctccataaattctgcctggattaaatgcaaccacctgccacataactaatggggcccaagtttagaaagaaaatcagtttctttgcagctgttcttacaacctgcctgttgttcttcagaaaccaaattccgaaatatcatctcacaggcagttaaaatgctaaatgaggagcactgggttgagaatggtgtagtaaggtgatggttgggggatgtcagcaggactcaaagacctgggcctcagctgtttctctcatcagtttgctattttacacattgacttgagcatggacgagagtgttcaggagcaaataccttttaggtagcagactgagcatgtgcaggtttgactcttcttgtgctcctaggacagagcaagtttcattttgagggatgggaggaggtgtaccttgctgtatctgagatggcaaatgcaaggcacgtgttcagctatccccatatctggcagacattgctaatctatgatggctctctttctgagctccaatagcctcagaatcctttcaacagagctttctggacagccattatcaaatggcaggtgttggcacaggagatgaagtctgtttgtcaagatttgggctaagtagtagattctttcttgaaaaaaaaaaaagtgtgcatccgtcacatttgtgggtaatccaaagcccttttttagtttaagtgcaggacaggacttgactttatagaaggacacagtggggatcatttttcttctacatctgaagttatccatgtcccaattctacttaaccacgttgttcttgaaaaaagagaaattgggaggaatttcttgtgaattgatctgtagttgcctgatttataaaatgggtgtaagtgagaatagattgataaaatgtggtggataccatggactatctacagtgactagaatcagcaaagcagaggtttatatcacagcacaatgaatctcagaaataggggactggatgaaagaagaaagaggatgacacaataacaatatgacttgcataaatttaaaatgtacaaacagcaaaaagatttccttaaaaagacataaagagggttgactataaaagattgctaattctggtccatttaaatgaagaaacttgctcatcaaaaatcagctttaagaacagaaaaggcaggggccaaatgtggtggctcatgccttttatcccaacattttgggaggccaacacaggaagattgcttaaggccaggagttagagaccagtctgggcaacaagcaagaccccatctgtacaaaaaataaaaataaaaatagctggacatggtggcatgtgcctgttgtcccagctacttgggaggctgaaacaggaggatcacctgagctcagtagtttcaggttacagtgaggtaggatcatgccactgtactccagcctgggcaacagagtgagaccttgtctctaagaaaaacaaaaaacaaaaaactgaaaaggcacattgtaaagtagattttttcattatatgcaaatgataatggatcagtattaagagtatgtaaagaactcctataaaccagtaagaaaactacagataactcaatagagaagtaggcacaagatggagacattttgcagagatggaaatatttatagccaattaatttgtgaagagatattcccaacattagtgactagggaattaaaaaggaaatgtaagatatttttcatagacaagactggcaaaatttttttcaaaatcaaatgttggagagtatgtatatctacaggaaccctgctatgttgctgatgagagtacaaattggcacaatactttgcaaaatttctcttttaaagttgaacattaatgtagctcatgacaccagcaattccactgtacaacaggaggcatgtaaatgttcgataggacgcatgtaaagaaagtctttagaatactctttttcgtacctaaaaaccaaaggtctaccaatgagtgaatgaatgaattgctgtatgtattttcaatggactattatacaccagttaaaacaagtgaagtggcatatgacaatattgtatatcttgtaataggtagaaagtgaaaaacaaatatatttggtaaaaattaagataatagacatatccataccagatgcatttaaacaattgcttgtgagggggcaaatgagaatggaaatgaggagaaaaggaaaaattttaaaatacaaatgtattattatatacatacattttatatatgtgaatgtgtatgtatcgatacaaatatgtatgtatgtatatggtataataatatttttccatcttcctcattgttaagttgcatggctcaactgcaatatagtgacatgattgaagagatttcatggcttcattcccccaaactgtattccatacacatagcagctataccttcagcttcaacattaacaatcctttgaagccaagacattgtatctctaggagcgacctcctgatttgctattaaactagaccataaccaattcttcttgtgtgacatgagttatttggtgacaatagaacctggctgggggggaatggttatgagagtgatgagttctgatgtgaggcaaatccagagttccttgtagatacagaatattagtgctagggggacacagcacaacttgggaacttctggggaccaggagggtactcacactgtgatggggaagaagaagagaatgttattttctattacgttcacactgctttacgatgagtcaaggggaaacgcgttgggaaagggatatgggtaaggttggagaatatggagaagtaattttactttttgaacagtttctccctcatgtgctgtgtgagattcatatcctcaataggagcctcatctgtttttacttcccatattaaatacaaacagtgcattaccctcttctcttacttttgtcacctgttcctgtaggatatgtggtgtctagagttcttagggagtcctttggctctcccaatattgctatttcctgtacaagaatttcaagcttctaccagaatccataagaagccccatccaggtgtaatggatagaaggaagatctgaaaacatgaatctgctgccatctttgtgaccttcccttctccctgcgtaccctgtagtttttcatcctgatgcaatccaatccagggacattcagtggcaatggcttctagagtggaaggcctggcgggagcatggaacgtgtgtatttggagtggagttggctattgtaatacttagtgaatggaatttcattaggtccttatctgtgtgcactgaggaaaagaggtccttttacacagtgcttgtaatggagtggaaaattgcatttccctcttgcccgaacagtgccattagtggggaggcagactgtctgctgagtgcaggaagccacctcgggcagtgcagggctgacagcccaaatgatggcagtgccgagagacccggaagatattaaaataaaaacagcttgtggtgttctttttgtcctgtagcagttcttccctgcaatgcagggagtgattggatttgaagcactgagaaaaacatgttaagtaagaaattgtttaaataaagttgtttgaggttgaaactctcccccaggcatggagggaaatgtagttagctgcgtgcaacttacagatatccaagaggcaccatggtttttttgagtcaggcaagtatgcagtacacttaaaaaatgaaatggacaatgagatctcttctttggtcatccaggtgggttccagccccacctgggaggtgtgtaggccctctgatggcctgttggtggatcaaatcaccatttttactttccttggttctcagaattgcaggtgagaatagctgtgagtctcactgcaaaaaacagcaagagaattactcagctctggggaaattgttgtttctaacctgatagggttcctttcttgtgggttggtgttagacacagtcccatggggagcagccagtgtgatagcagaggaggtgcacagcctgtccttgccgaggaaacagaatctatgcagctcctgggcccaaatacatccaaatacaaagtggtgcagactaggaatgttgggaggaactatgagtgcaagagcctttcatgattgcccaaaggcactgggagaatgcaattaaagattttgtcaccaccaggcctgccctaaaagaactcctgaaggaagcactaaacatggaaaggaacaaccggtaccagccacggcaaaatcatgccaaattgtaaagaccatcgaggctaggaagaaactgcatcaactaacgagcaaaataaccagctaacatcataatgacaggataaaattcacacataacaatattaactttaaatgtaaatggactaaatgctccaattaaaagacacagactggcaaattggataaaaattcgagacccatcagtgtgctgtattcaggaaacccatctcacgtgcagagacacacataggctcaaaataaaaggatggaggaagatctaccaagcaaatggaaaacaaaaaaaaggcaggggttgcaatcctagtctctgataaaacagactttaaaccaacaaagatcaaaagaggcaaagaaggccattacataatggtaaagggatcaattcaacaagaagagctaactatcctaaatatatatgcacctaatacaggagcacccagattcatatagcaagtcctgagtgacctacaaagagacttagactcccacacgttaataatgggagactttaacaccccactgtcaacattagacagatcaacgagacagaaagttaacaaggatacccaggaattgaactcagctctgcaccaagtggacctaatagacatctacagaactctccaccccaaatcaacagagtatacattttttttcagcaccacaccacacctattccaaaattgaccacatagttggaagtaaagcactcctcagcaaatgtaaaagatcagaaattatagcaaactgtctctcagaccacagtgcaatcaaactagaactcaggattcagaaactcactcaaaactgctcaactacatggaaactgaacaacctgctcctgaataactactgggtacttaacgaaatgaaggcagaaataaagatgttctttgaaaccaatgagaacaaagacacaacataccagaatctctgggaaacattcaaagcagtgtgtacagggaaatttatagcactaaatgcccacaagagaaagcaggaaagatccaaaattgacaccctaacatcacaattaaaagaactagaaaagcaagagcaaacacattcaaaagctagcagaaggcaagaaataactaagatcagagcagaactgaaggaaatagagacacaaaaataccttcaaaaaattaatgaatccaggagctggttttttttgaaaggatcaacaaaattgatagaccactagcaagactaataaagaagaaaagagagaagaatcaaatagacgcaataaaaaatgataaaggggatatcaccaccgatcccacagaaatacaaactacgatcagagaatactacaaacacctctatgcaaataaactacaaaaatctagaagaaatgggtaaattccttgacacatacaccctcccaagactaaaccagaaagaagttgaatctctgaatagaccaataacaggctctgaaattgtggcaataatcaataacttaccaaccaaaaagagtccaggaccagatggattcatagccgaattctaccagaggtacaaggaggaactggtaccattccttctgaaactattccaatcaatagaaaaagagggaatcctccctaactcattttatgaggccagcatcatcctgataccaaagccgagcagagacacaaccaaaaaagagaactttagaccaatatccttgatgaacattgatgcaaaaatcctcaataaaatactggcaaaccgaatccagcagcacatcaagaagcttatccaccatgatcaagtgggcttcatccctgggatgcaaggctggttcaatatatgcaaatcaataaatgtaatccagcatataaaaagaaccaaagacaaaaaccacatgattatctcaatagatgcagaaaaggcgtttgacaaaattcaacaacccttcatgctaaaaactctcaataaattaggtattgatgggacgtatctcaaaataataagagctatctatgacaaacccacagccaatatcatactgaatgggcaaaaactggaagcattccctttgaaaactggcacaagacagggatgccctctctcaccactcctattcaacatagtgttggaagttctggccagggccattaggcaggagaaggaaataaagggtattcaattaggaaaagaggaagtcaaattgtccctgattgcagatgacatgattgtacatctagaaaaccccattgtctcagcccaaaatctacttaagctgataagcaacttcagcaaagtctcaggatacaaaaccaatgtacaaaaatcacaagcattcttatacaccaataacagacagagagctaaatcgtgagtgaactcccattcacaattgtttcaaagagaataaaatacctaggaatccagcttacaagggatgtgaaggacctcttcaaggagaactacaaaccactgctcaattaaataaaagaggatacaaacaaatggaagagcattccatgctcatgggtaggaagaatcaatatcatgaaaatggccatactgcccaaggtaatttatagattcaatgccatccccatcaagctaccaatgactttcttcacagaattggaaaaaactactttaaagctcatatggaaccaaaaaagagcccacatcgccaagtcaatcctaagccaaaagaacaaagctggaggcatcacactacctgacttcaaactatactacaaggctacagtaaccaaaacagcatggtactggtaccaaaacagagatatagatcagtggaacagaacagagccctcagaaataacgccacgtatctacaactatctgatctttgacaaacctgagaaaaacaaacaatggagaaaggattccctatttaataaatggtgctgggaaaactggctagccatatgtagaaagctgaaactggatcccttccttacaccttatacaaaaattaattcaagatggattaaagacttaaacattagacctaaaaccataaaaaccctagaagaaaacctaggcattaccattcaggacataggcatgggcaaggacttcatgtctaaaacaccaaaagcagtggcaacaaaagccacaattgacaaatgggatctaattaaactaaagagcttctgcacagcaaaagaaactaccatcagagtgaacaggcaacctacaaaatgggagaaaatttttgcaacctactcatctgacaaagggctaatatccagagtctacaatgaactccaacaaatttacaagaaaaaaacaaacaaccccatcaaaaagtgggtgaaggacatgaacagacacttctcaaaagaagacagttatgcagccaaaaaaacacatgaaaaaatgctcaccatcactggccatcagagaaatgcaaatcaaagccacagtgagatatcatctcacaccagttaggatggcaatcattaaaaagtcaggaaacaggtgctagagaggatgtggagaaataggaacacttttacactgttggtgggactgtaaactagttcaacccttgtggaagtcagtgtggcgattccttggatctagaactagaaataccatttgacccagccatcccattactgggtatatacccaaaggactatatatcatgctgctataaagacacatgcacatgtatgtttattgcggcactattcacaatagcaaagacttggaaccaacccaaatgtccaacaatgatagactggattaagaaaatgtggcacatatacaccatggaatactatgcagccataaaaaatgatgagttcatgtcctttgtagggacatagatgaaattggaaatcatcattctcagtaaactattgcaagaacaaaaaaccaaacaccgcatattctcactcataggtgggaattgaacaacgagaacacatggacacaggaaggggaacatcacactgtggggactgttgtggggtggggggagtggggagggatagctttaggagatatacctaatgctaaatgacgagttaatgggtgcagcacaccagcatggcacatgtatacatatgtagctaacctgcacattgtgcacatgtaccctaaaacttaaagtataataataataataataaaaaagagtctccttaaatactgaatagagaaaccattaggaaatttcatattcaagctacagaagaattacctggtccagccatttcttgtagagatgaggaatttctttctctgaaggtgcaagtatcaaagcagactcccttgaggctcctacctctctctaatggatgtgtctataatgttatagactgaatcatgtgttcccccaaaattcatatgctgaaatcttaaactgcaatgtgatggtaataggaagaggggtcctcaggaagtgattaagtcatgagggtggagccctcataaatgggattaatgcccttacctgtgggctcccagagagctttcctgctctcttttggccctgtgaggatgcaatgagaagtaggcagtgcagctccagagagggctcccaccagaaccaaccatgctgacacctgatttgtgactttagcctccagaactgtgagaaaattcctattgtttcagccacccagtctgtggtcctttgttatatcacctcatttgactgtgacagcatctcttcgtggtcttttctctgttttcttgtccactctttcctccagctactcttctttcacttcctctttgggagaattgtctttctacttggtctatcccttggcctcagccttctgttcttgcctgccggatatggaaggttgactgggatcagctacctgccaaccattctgttctctagtttccccaggtattccttatgtctacataagttagggttgggaagttgtggctgtgcctcagtagggcccctcagcatcacagtggttgctaagccctgtcctaggacattataattttctaaaaatttatatgactctcaaattctatatgaacacatatatcattatgttaaaattattaatatatttaaattagtaatgagggaaccagtgatgtggtaaagctggttctaagagcacttgaggaactgggtatgtataagcactgaaaaaaaaaaaagaatgggggccaggcatgatggctcagcctataatcccagcacttttggagaccaaggcaggcagattgcttgagcccaggagttcgagaccagcctggaggaaatggagaaatcccatctctacaaaaaatacaaaagttagccaggcatggtagcatgcacctgtggtcccacctactcaggaggctatagtaggaggatcacttgagcctgggaagttgaggctgcagtgagccaaggtcatgccactacactccagcctgggcaacagagccagaccctgtctcaaaaaagaaaaaaaaaatgttaggcaaggattgctaggttagattcaaagctggtcagtattctacagagcaataaaataataatgtctaggactctttttttttttttttttttttttaccggacaaaaatctacaatttaacatgtaacttcattgtatctaggttgtgatcaagtaatgagcagtgaagtcaaatataggtatgatctaggaagaattaactaacccttgggaagacctgttcacaaagataaaatatgccattgaagggatattgtgtccttccttgtccccctacccctttacatccaagttttggatgctttttcttaacaatataaacccagcatttgagtctatatttctttgtaaatgtaccagatatggtatatctggttctgttatgactccatcttgaagtaaagtcccagctagtatgtcaggtatccactaattaattaaacgtttaacacatttattgagttgtctctgtgtgctatggtttggaaatatttgacgccgccaaatctcatgctgaaatttgatccccaggccgggcacagtggatggctcacacctgtaataccagcactttgggaggctgagctgggtagaccacctgaggtcaggagttcgagaccagcctggccaacatggtgaaaccccaactcaactaaaaatataaaaactagctgggcgtggtggtgggcgcctgtaatcccagctactcaggaggcagaggcaggagaattgcttgaacccaggagacggaggtttcagtgagctgacgatgacacgatgccaccgcactccagcctcagtgacagagtgagactccgtctcaaaaaaaaaaagaaaagatatttgatccccagtgttggaggtggggcctaatgggaccactttttgggtgatggggatggatgcttcataaatggattggtaatgaatgaggtattgctctattataagttcctgtaacagctggttgttaaaaagagcctggaacttcctcacttctctctcttttcttctctctccatgtgatctgtacatacattggctcctgtattagtccatgttcacactgctgtaaagaaatatctgagactgggtaatttattttatttatttatttatttatttattattatatatatatttttattatattttaagttctagcatacatgtgcacaacatgcaggtttgctacatatgtatacatgtgccatgttggtgtgctgcacccattaactggtcatttacattaggtatatctcctaatgctatccctcccccctccccccaccccacaacagcccccggtgtgtgatgttccccttcctgtgtccaaatgttcctattgttcaattcccgcctacgaatgagaacatgtggtgtttggttttttgtccttgcgatactttgctgagaatgatggtttccagcttcatccatgtccctacaaaggacatgaactcatcattttttatggctgcatagtattccatggtgtatatgtgccacattttcttaatccagagactggataatttataaaggaaagagatttaattgactcacagttccagaaggctggggagacctcaggaaacttacagtcatagtggaagggaaagcaaacacattcttcacaaggcagcaggagagagaagtgtgagtgaaggaggaacttgcctaacacctataaaaccatcagatcaggccgggcgtggtggcttatacctgtaatcccagcactttgggaggctgaagcgggtggatcacctgaggtcgggagttcaagaccagcctggccaacacagtgaaactccgtctctactaataatacaaaaattagccgggcatggtggcacgtgcctgcaatcccagctacttgggaggctgaggcaggagaattgcttgaactcaggaggcagaggttgcagtgacccgagatcacgccattgcactccagccttggcgacaagagcaaaactccatctgcaaaaaagaaaagaaaacaaaacaaaacaaaaatcagatcttgtgataaatcactatcacaagaacagcatggtgaaaaccgcccccataatccagtcacttccctccctcaacatgtggggattacagtttaagatgagatttgggtggtgacacagagccaaaccatatcaggtccccttcaccttcctccatgagtggaatcagcctgaagccctcaccagattcagatgttgtgacatgcatcttgtacagcatgcagagctgtgagacaaataaatctcttttctttataaattacccagcctcaggtactcccttatagcaacacaaattcactaagacattgtgtcagattttaacgtatactgatgaataaaacaagcaatgttgtgaggttcatgataagagaaatacatggcatatactttagaaaaaaatattatggaaagcctgtcaaagtgcctctacctgttatctgaatcacatgatggagtgaattccccatgcctgtttgcctgaattagttcagataagcaggagttggttatgttctatcaaattctgtgaggtatgaatggaaaaaaggaatttagaatggtttttcatgttggtgtgaccttgtttactgtgttcctccttggattcaaagtctacccaataagtaatatcagtaaatatatcggtaaagtatattgaagcactagctgtggacttttttttgtttatttattttaagatttttgataatcatcctaaatctattcttatgcaagagtcttaaagtagaaagtttctctgttttttcttccttcctaaactccttcaatgtgattgacaactggctccatgaacgtggggcattgtacctaccaactgtaatttttccatcagtggaaatcttgcaagtctttgacagacagagtagaatgcagaggttgtggatagtagtgaatttcccaaggccctgatagttttagggtgatttttgtttctcaagattcttttagccaaattgtaaagccattcttgtaatcaactgaatttcccctttgatattatccccaaggaagagtaactacattagtgttaagaccagagaatcacagggcatatcctatagtctctcatagtatgtcctattactggctctctgagaaagggagacaggttggttttaatatcgcatcagtatgtacagtattttttattaaatactggccaagtataagtcacttttaggccataagagggatatagaggtataagaagagaaactcacagagtagttgaggagatgagatacccacagaccacatagatacttatataagaaaatgtgtgcagaattttgactcagcattccaggctacagtgctcacagagttcaaccagtggggactgtggagggcatggaaggttcttaatggaaattgttagtcttttttttttttttttagacagagtctcgctctgttgctaggctggaatgcagtggtgtgatctttgctcactgcaacgtccgcctcccgggttcaagtgattctcctgcctcagcctcccgagtagctgggactataggcacacgccaccacgcccagctaatttttatatttttagtagagacggggtttcaccatgttggccaggatggtctccatctcttgaccttgtgatctgcccacctcagcctcccaaagtgctaggtatgagctaccacgcccggcaggaaattgttggtcatttaatctattttaaccacccaaggggttccttggtgccctctgcataaacaaagaccatggcattgtaatagacggagtttaatagacaccaggccaggcatgccatgtgggagatgaagttcatactcaaatcatcttgtccagaattcataggattggcgtttttcagacagtttggggtaaaggggtaaaggtgatcaggtaacagacacttgccgctgattggttggggcaaagatgaaatcatagggggttgaatcggtcctcctatgcactgaatcaattcagggtggggccacaggagtggggttggcgagtccaggtggagccatgggtgtcagacatgcaaaaaacctggaaagatatctcaaaaggccaacctacaatagttgtgttatttgcaggagtaattggggacattgcacatcttataacctccagaataatggctgacaatcatttatgcctgcaccttagcaggactcaggttctcctctgcatagcctgataggctcccactagctttacaaaaagcacttgagttttgggcaaggcctattatttaaactatagcttaaatgttttccaaagttagcttggcctaataactcaggaataactaagggaaaggcaagatgtggggaaggttagcttagcttactgttataatttttctcactgatacagtttttgcaaacatggtttctctatgaaggataaatgcaatctggattatagtagaagcaggagatgttgaaattctaaggagaatggagctgggacaatggaatgcgaaggtttggacaataatataccaagtatgtctttgttgggcgagaacgtctgttgaggtttggtatttgagtctgagaattgaaatgacaatagaccaatcaacaggagaaaaggtacataaatttactacaggcatggggcatcacaagagacagagtgcccaataaccccgtgagattcgaagcttatatgcccttctccatgggagagagtagtgggggtctgcaggcacttttagaggaaaaagtaaatgatgtttaggagagaagaatgggcatcaagaacagatgatgtcctgggacgaagtctgtctgggctctgagtgtgctgtgtactctagtcttcatttctgcaagttaatcttccctgtttgatgagattatagagaggtgatgcaagacaattgcattccttctagaggaacttcccttagtcagatgagggaacttcagaaaaagccgccctctgtgcttggcaagaggtagaggggtgagagagggtgggcagaagaaggtcagactctggttctgagactgcttctttagttcaaaatactcagcatatcaacacccccacactttgaggtatctcttccgagcccgtgtctttgcgggtgggaggttggggaggatccagtctgggcttgggagttggtggcatccttttttatagctgctccaggagcacccaacctgggtgtgtttactgaagttgtacgcatgctcctttgagccattttcgacttcaccattttgccccttagttcactttcttaagcccattcacccaactcctgagatcttttcaggaagctgctgataaccagtttcaggtatttctatctattggtaggctgcctttccctggagccccctgggaccaattattattttagcgaggcagtgtaataactgcctgaccatcacctgatggttgcctgacattcctggtggggtaggggtgggtctctcctgccctgctgatgtctgactgcctacctactgtaacaccctaactaaaagttgagttaactctgaaatcaagcaacaccaagcagaaagcagagagggaaacttgtccctttcaaaacagattaaatgtttcttattaattcagttgcttccacacatattcaagtttgtatccagaattaagcgagtcagtagttttaaatcaaattacaaatacagcatccttcatatctgaaataattgtgtatctgtatgtaaatgctgggagaatatacttttttggatattattctgactgtagtttcaaaaaaaagtagatagaaatctggaaaaatgagtaaacactattaattagatgagatatttatccttggcttaaattagaaaacttactaagagaaactatgaaaatatcaattaaaacaactagcatgattttatttttcactgttaagagggcaaaaaaaaaaaaaaccccaaaaatcccatgcatgaataaaataaatatatatttggggatgacaccatcttggcatttccaggcattcttttctaaacatattctttatctgagctgtcttgcaatacttttaatataattaaaagcacataatgagtgccagacttgtcaatttcaacaacaaagtgctgaaatttgcagtgaaactgagagatccatctcccatacattgtaatgaataggttcataaaaggaaaatagtttaattacattttagttcatggattgttaataggctggagtatctaaattgaataatgtgattctggtaataattatgtgtaaatgaacttgtttaaatgatattttacagcttctttataaaattacagctagaggcaatccagtgatagacagacaaaggccatgcaaaaattatcataaactattagcttgtttgcaaagggttttatgttaatcttttagtacttaaagcaatctgcaattaacatatcatggggagctgcctccgagcaaaggcatgcaaattgaagtgcttagataaaaagccattcatgttgtgggggaaagagaaagaaagaaaaaagaaaaagaaaaaaaaatcaaagaaagggtggcaaagtactcagagggtgctggtttttatatttgagattaaggaggtgtaatgattgtgttatctaactatggctgtaattaaagcttttctccagcagacatgacaatagatactgcattgatttcggtgttttaattgtgaaagtcattttatttcagggcagaagatatgaatagcctgaatcaaagggctagaagattgctttgttgatagtacttgttcaacagctgcctggctgcttaatacacaagtgtggagaatgcagagagacccaaggaggtgctgggtattgtgattctcctgctggtttcctttccttttatgaaaaaggcaaggatcttggtgctgactgtaaacaaacagccttttcatacctcatcgatgtttttcctccccaactttgcagaacaaaagaagtcataaagggccttgaactaactttactactgctccttttaagctacagaagtttatgcaaagtaataaaaaccatctttgctagtggagatatcacccctctaatgatgaaaaaaagtctctgagtgactgtggtagttattatcacaaatagccttgtgacagaaacagtttgtaggagagaggttggattatttacattaagggcatatccacaaaatctcacacacagttagtttgagattagtgctttcttatcagtttctatatacaaaccacaggagggaaattaagtgaggggaaaacatatacaatcccagagcaaagagaattctaaagagaattttagggagatcagggtagacttaaaataaaaatcacattcttggctatttcttctataacacttcagtgtaaatggaggtgaaacccagtgatttccagtaattcctattctattgatttatctcttctttgttcctagaaatatcaaatagcatgtttaaaggagtctgaataataataaacttggttttagggaacactgtttctttaagtgatatgatttaaaataaccagacaccaagatattacaaacataacaataataacataatcatttactgagtgttgtgctatttttatttatatttctgatgatataagggagtgaaaattttccctctgccctctgagagtttgataattgaatctatggaataaatggacattagaccaattaataggagaaaggacacataaatttattacatgcataggagcatcatataaaacaaaggtgaacacccagtgagatctagaagtttttataccctcttcataggggagaagagagggggaatgcagacaacttagggaaggtacaagcataccttggagatattgaaatctcaattctagactgatgcaggattttcttcttggtcaccgtgcaagctggagacctctggccagcgatgccctaccctggccttgctcgaccacactagctgctgcaggagatggcctctacctgctgtaggagacggcctaagtctggcttacacactggttcccgagttcttgtcttgcacccaagaaaaataaggatgtactgacaatggaagagtgagccagatggggagttttattggtgatgaaacagctttcagtggagaggggacacaggggtggtccccctacccaaaggtgggaaagtcccctgtgtgtctgggcctggggccttttatggactcagaatggggagtgtgtgctgattggtttgggggtatgcaaaaaagtttaaaccaaagacaccactcaaaggtgggcatgacagtgaagaaaaccaattacgaaagggtaggtatatgtaaaataggtgaaaggtggggacagtcagagaaaagtgcgccaaatgggaagacaagttctcagtctggtccaagaatttaacttgtagcttggctttcaggcttcaaactgtaatcagcttggaggtgggatttcaccggggacccccactgtctgcctaggcatttggctgcctcctttcactatcaagactgccccaataaaacaaaaattgcaataaagcaagtaacatgaatgtttggttttcccagtgtgtataaaagctatacaatactgtagtctgtgaggtgtatgataacattatgtctaaataaacaatatacataccttaattttaaaatactttattgttaaaaatgctaataactatctgcattttcagttagttaccatctttttgctggtgaagggtattgtttcagagttgctggctgctgactgatcagggaggttgttgctgaaggttgggatggctgtgacaatttcttaaaagaagacaacaatgaggtttgccacattgattgactcacgaaagatttctctgtagcatgtgatgctgtgtgatagcattttactcacattagaacttcttttaaaattagagtaaatcctctcaaaccctgcctatgctttatcatctaagtttagtaatattctaaatcctttgtggtcatttcaagaatgttcacagcatcttcaccaggagtagattccatctcaaaacaaacaaacaaacaaacaaaaaacactttctttgctcatctataaggagcaactcctcatctttaaaagctttatcatgaagttgcagcaattcagtcctatcttcaggcttctcttctaattctggttctcttgctatttctaccacatctgctgttatttcctctactgaagtcttgagcccctcaaaatcatccgtgagggttggaattcacttctttcaaactcctgttaatgttgatactttgacctcctcccatgaatcacaaatgttcttagtaacatctagaatggtgaatcctttccagaagattttcaatttctattgcccagatccatcagaggaatcactatctatggcagcgatagccttactaaatatatttcttaaataagaggacttgaaacttgaaattactccttgatacatgggctacagaatggctgttgtgtgaggaggcattaaaacagcattgatctccttgtatatcttcatcagagctcttgggtgaccaggtatattgtcaatgagcagtaatattttgaaagaaatcttttttttctgagcagtaggtctcaatagtgggcttaaattaatatttaagtaaatcatgctgtgaacggatgtgctgtcatccaggctttgttgtttcattgatagcacacaggcagagtagatttagcgtaattcttaagggccctagaatttttggaatgataaatgaacattggcttcaacttaaagtcgccagatacattagctcttatcaagagagtcagcctgtcctttgaagctttgaagccaggcattgacttctctctagctataaaagccccaaatggcatcttcttcccatgtaaggctgttttgtctacattggaaatctgttgtttagtgtagtcaccttcatcaaatcttagctggatctcctggataatttgctgcaatttttccatcagcacttgttgcttcaccttgcccttttatgaagacagcgtctttccttaaaccttatgaaccaacctctcttagcttcaaacttttcttctgtagcttctttacctctcagcctttacataaatgaggagagttaaggccttgctctggattaggctttggcttaaggaaatgtcatggttggtttgatcttctatccataccgctaaaactttctccatatcagcaataaggctgtttcactttcttatcattcatgtgctcactggagtagcacttttaatctccttcaagaacttttcctttgcattcactgtttggctaatcgtttggtataagaggcctagctttcagcctatcttggcttttgaaatgccttcctcactaagcttaatcatttctagcttttgatttaagtgtgcctctttctttcacctgaacacttagaagccattgtagagttataaattggcctaatttcaatatcgttgtgtctcagggaatagggaagcctggggagagagagagagatggggaaacagtcagttggtggagcagtcagaacacacacaacacttattaagcttgccatcttctatgagcatgattcatggtaccccaaaacaattaggataatgaaatcaaagatcactgatcacagatcaccataacagatataataataatgaaaaagtttgaaatgttacccaaattaccaaaatgtaacccagagacgtaagataagcacatgctgtgggaaaaatggtgttggtagacttactagatgcagggttgccacaaatccttcagtttgtagaaaaaatagtatctgtgaagtgcagtggaatgaggtatacctgcagaggatttctgggaaagatgaatgggccctcagaataggtgacagcctgcgacagggtctttctgggtgtggtgtcacctctattctcctctcttgtgatatagataattgtccctggctgataagattctacgggagggaattcatgactattgagttacaggagtagaagcttggaatttctgggggctggcagggacatgagttttgggaagatggggttagaaactgtatgacgaataagggttgtcttcttatacagattaaaagactctcaggtcataacagttttctgcagctagcagactttttctgatccagatagtttactaatgtagatttcctttacagatgtaagtttcttttacaaaaggacaagttttcagagctacttccgtgtgtgcagttcctcagagtaaccagctcgaaatatgccaaagaaatatagtttggggtggtacattctgtttggcgagcccaaaaaatgacctccaataaccatcccaaagaagtcgatgggatgatccattttctaaaacgagtgaacttagcctcaggccaaatatattgttcaaggtcacatagcaagggaggggcagaggcaggttagaacccagacagtctagctagatctctaggaaagcctgatgccatcctcacagggttaacaagaattctggacagaaatgtagttataattaagcattaattaagcaggctgcactttgacccagttccttgtaactgaaagtcaggtaacaccagatcctgactatttgcatccccattgttcctatagacaggatttctggagttacatcaggcttttaagatagataggatctctgacactacaatcataaggtttatgtttgagaattgcagatgcagattctgaattccagtggaacagctaatgctaaccattttgaagaccccaacagaggaactgaatcagcatgagaatggtttcttcatctccctgtcccatgacttactctgcactctttaaccaatcaatggtctccacactttggcccgctcccagacctttaaaaaccctagccccaaactccttggggagatggatttgaggtttccttctgtctcctcgtttagtggcctatgaccaaacttctttttctgctgcaacccagcatcttggtgtattgacttgccatgaacatcaggcagcaaacctattatggtcacaagcccttagacttcttctctgattaatgttttctaagtgcacaaaataaagtacaaagggttacaaagcaaatgtagtatattgaaatactgttatcaaaatatttaaaaataaaatttatgacttagtaatttatgtgcttacagccagcagcaactataatttcaaagctatgctaacatctactataatttcaaagtgttgataagcataaacagtgttttggatttctgcaataatgtgacatgaaaatacctgattttttatcaatgataaagtcacagatactccttaaactccagtcattttgttgcctacatttataataaaagaaaatggggctgaggccagaggattgcttgagtcttggagttggagattgcagtgagctatgactgcactactgcattcgagcctgggcaacagagggagaccctgtctcttaaaaaatagcaaaaacagaaagaaagaaaatgttaagttccccataaacattactgaaaataaaactatatttttatatatgtcagatattatacaaaaatacatgtgtagataattatacataaaaataatttttcccaccaaaattcacagacctctaaattctataggtgtacaaggcttaggttaagaacatttttggttttacagatgaggaactgaggcccagagaagggaatttagtgacccaaggttatcagtaatcagtgataagatgtagattagagctgattacactaagagaacataaggaaaacttaaaatactgtatgttgatcttttccctttctcctgtgactttggtggcttttgctgacatgctcttggaatgttgaacctttctttgtctttgcaatgttgtctttttcaaagtgggagcagcaagcaatttccccagccctgagatcagttgttggcaattcctgctttcagtggcagggctgggaggatcccagaaagcgcagccatagggactccagggaagcttcctgtgattgcaacctaaatttgaaaactttctatttaaagggacaagagtgcttttttttttttttttttttttttaagatggagtcttgctctgttgcccaggctggagtgcaatgatgtgatcttggctcactgcaacctctgcccctgggttcaagcaattctgctgcctcagcctcctaagtagctgggattacaagcacgtgccaccacgcctggctaatttttgtgtttttagtagagatggggttttgccatattggccaggctggtcttgaactcctgacctcaggtgatccaccctccttggcctcccaaactgctgggattataggcatgagccacggcacctggctaagagtgcatattcattatgtgtctcctctacgcgaggtctttgtatatcctcttccagttaatattcagagaggcctaataaatagtccccatccttgttctagaggggaagagagaaactcagagattgccatggcacatggtgcttgtggtgagccggggttgagttagactttagctatgtcctcacagcctaatgacgcaggcaatttggtcctctatttacttattaggaaactgaggataaaagacttttagcaagatggccaagttcatgacttattaagtgacagagccacgaatttaactgaagtctgttgcctgtaatactcatctttgttccccagactctgttgcccttacattgaaggaataaggacccccccgccctcccatcttctctacccaggggtcttctcctcaggtgtctattgcatatctgttatttacagggcatgtcccatgtgggcatgcaggaggggaagggcagcaggtagaaacacataaggatatacttgattttgagctgactttcctaacgtccctaattggataaataaagctaacacaaagggaacacacagataatgttcgatgacaaacacggacaacatcaacaatgtaataataataattgtgatgatgatgataatagctaacatttattgaatgcatactattttaaggattttccaaaagttgtttctttttttttttaatttgatcacatatcccataaagaagagtgtgtgatggcgacggcacccttacacacttggcaggaaggacatggctgagggtgccacagtcataaacacagaaacacagagatatatgttctccttattgattttgtaataatattggtggcaatcttagctatgaattgagtgaacaggtattatgggaaaggaagggggtgagatggatcaaccaggccaactcccagggggccatgttggcaaattttcctgcctcatgccttgccttggtgacgtacaaattttaggcattttaaagaaataccccaaactgtcagccctgtgcagagggagcatggttcactccctagatagtcaatttgggtgatagggggtggccagctgcttgcttgggtctcaggggagaggccctgatctttctggtccttctcccccaatcctaacctcagcccagacatcaggtcatttctacacactgcattaggcttctctaaccaataaggaacatttacccttaaacatggtcaccatgtcattatcacaactaaaaaaagaataataattccatagggcttttcaatacccagtccatattctaattttcccagttgtctcaaaaatatctttttgtatccagttcgtttgattcagtgtccaaacacagcccataccttttattgcgttgctgtatccctttgatcttttttagtctttaatcatctccctccccttctcctttttcatcttctctttgtctcttatgctctctgtttctctctctgtctctctctctctattatgcattgatatttttgaggaattgaatgagttatcctgggcaatgacccacattctgctttggctggttgcctccttgccatgccatctaacttgttcctctatcctctgtactttctataatctggtgtcagatcaataacttgtttgaattcaaattcatttttttttgtatatggtgctgtatacttcctattgcattacctcctgagatgcataattaatatctgatcatggtaactctgtgaggtgatgggtgtgttaattaatttgattgtgctaatcattacattttatgtatatatacttatatataatgtatatatacatacacaagcatatgtcgaattattacattgtacaccttaaacactatatacagttttattggttaattatatctcaatatagccgggaaatttttaaaaataaaaacaaaaacaatcccatcaaaaagtggactaaggacatgtatagacaattctcaaaaaagatatacaaatggccaacatatgaaaaaaatgctcaacatcactaattatcaaggaaatgcaaatcaaaatcgcatacacacacacacaccacacacacacacacaccacacacacacatacgcacaccatagaatactacttaactataaaaaggaatgaaataatggcatttgcagcaacctggatggaattggagaccattattctaagtgaagtaactcaggaatggaaaaccaaacatcatatgttctcattcaccaccttactcccgcaagaagggccataataataaatatatgtaatatatatatttgtgtatatatatgttatatataatatatacatgttatatattatatatatgttatatttatatatgttggcatggatgtggtgaaaagggaacacttttacattgttggtgataatgtaaactagtacaaccactatggaaaactgtggagattccttaaagaactaaaagtagatctaccatttgatccagcaatcccactcctgggtatctacccagaggaaaataactcattatatgaaaatgatacttgaacatgcatgtttatggcagcataacttgcaattgcataatatggaaccagcccaaatgcccattaatcaatgagtggataaagaaaatgtgagatagatagatagatagatagatagatagatagatagatacacatatatatgtatatatatacacatacatatatatgtgtgtatatatatatatacatatatatatacgcacacacacacatacacacatacatacacacacaccccatggaatactacttagccataaaaaggaatgaaataatggcatttgcagcaacctggatggaactggagaccattattctaaatgaagtaactcaggaatggaaaaccaaacatcatatgttatcactcataaatgggagctaagttatgagaatgcaaaggtataagaatgatataatggactttggggtcttgggggaaaggtgggtgggtggtgagggataaaagactacaaattaggtacagtgtacactttgcaggtgatgggtgcaccaaaatctcagaaatcactactaaagaccttattcatgtaaccaaacaccacctgttcccccaaatcctattgaaataaaaaattaaaaataaaactgtatcttatcagtaggttcagatggttcttccactgaaagaatcagctggagtcttccattgtaaggttcccaaccaaccttttacctaatgtttgagcatcttttgatgatggtgacctaagtccattatttcattacaggtgggagaataattttctaattttatcatccctttgtatttattacctggaattctgccatgaaggattttcttccatatagtaattgcttgaaatcttttttttctcacagcagataacttggtttgaaacatagtttctgtgggcattgactgtatgaaatgggaatatgaagtgtttccagatgcagcggaagtgggaggctgagggtcccctgcaggcacaggattcccttcatcctctgtacctgtagcagaggagcccttgggctccagcagtacaattggggaatgccctggtgaataacactgcctgacccccatcctcaccaggcttacaatgtggggtcctggagactgaagggtatgcctgtagtacagagagggtagccactcaccagcttcatgactttggggctgttggccacagtcaacattgcttccttatctgtaaagtgagaataagagtactaacctcacaggatggttgtgaagattcattatgctaatgcctataaaatacttggcatagttttggctgtataacagtgcttaataaatgctggcttgattattcttattgtaataatttttttttaagagacagagtattgttatgttgcccaggctgtagtgcagtggctattcacaggtgagatcccactgctgatcagcacaggagttttgacctgctccatttctgacctgggctggatcactcctccttagtcaacctggtggttccctgctcctgggaggtcaccatattgatgctgaacttagtgtggacacccaatcagcatagctcactacagcccagaactcctggactcaagtgatcttctcacctcagcctcctgagtcaccaggactactgactattgcattggtttgttaggattgccataacaaagtatcacaacgtgggtggcttaagaacaacagaaatttattctctcatagttctggaagccagaaatgggaaataaaggtgccagtgggcccaggctcctccaaagactctgggtagaatcctctcttgcctcttccccacttctggtggtagctggcaatccctggtgtgctatcacttatagatgcatcgtgccaatatctgcttttgtcaccacatgcccatcttttccttctgtctcttcacatggtgttctcctctctacatgttcacattgtcctcttagaaagataccagccatattgagttaagggccaaccctactccagcatgacctcatcttaactcattacatctgcaatgtctttatttccaaataagctgacattctgaggtactggggtttaggactcaacatatctttctgggggatacaactcaacccataacaattgtgtaaccatacaacaccgagttgtcctacatcttgacatatagaagggttccttgtactttattgttatgccacatttcttgcattttactgttttcctactggttttctctcagatatgagatgctatgtagtgcagagtgaggataagatgagcagctcttccacgtttagacccagagcagacacttgaataagtcgttctccacctccaaagacaggataggagcaggaaacatcagccagaacatctcgtataaacagcagaagcagtacagccttagagaacccatccacacctcagaacttcccagccaagctcatgctggcaggcacccagtgattctcccgtccgtatcacgacaagcctcggagtgaactgtttatttatcaattcttaattgagttgatgtttactcatgattgccagtggatgagtaatttactacagagttcgaggagtcagatagtgaagagatcattataaagagaaattataatagagttccctgtactcatgggtctggtaataaaagattgatataattagatggggcttggtaacaaatactattacattatgtctgaatcttatttaaatatattggccttttatcttaaacttattagtgggtggctgtagcttacgtcgacaccagctagctattttactcttgcaaaaggagggctgagctatacaaaggagtcaatcatttgatgtttagaagcaatggcacggtatttaaggcagttctccctgttgatttttagaggaagagcaaggtataaggggaacttaagcttccacttggtcacaaactttctggataacaaattcaggggctgtgtttctctgtactgtggctgtggctaccttggaacctttaacttggccaaagtcatccttgagaaagcagataaaggaaagggcaggaaataatctgacaacgtagtgagaaaatgagctgtggagtaagacaggcctgagatgaaaactttgccatagtgggttgagtggtagcccccccaaaatatatcgctccatcctatccctgggacctgtgaatgtgaccttcagtggaaaatgagttgttgaagatgtagctaaggatctcaagaaaagatcatcctggataatccaggggggctataaatcgaatgacaagtgtccttggaatagacacccagaggagagattaatggagaagagatatgaagatggaggtagaggctggacttatgtagagctattagggaatagatttctgttgttttaagccaccaagtttatggtagtttggtgcaagatccctgggaaacaaatataccagttttataataaattgcttatatgactttgggctagactcttaatctttacaaacctcagttttctcatctgtaaaagttgggttattacacttgtctctcagtatcgtgaggaccgtgaaagctcacccaactcagtgcctggtacatgacaggcattcagtacacatcagattccttctcccatcacctcctacccattttcctacatgatgtttcaacttgaaatctttttcatcttctacgcctcctaaaatgtctgcaaaactaacagccctcccctgaagaatgttccattcttcaggagctgttcttaggactgtcaaattagaggagaaagcatggtacagctggtgtttttgcggcagttgggtgagagccatgtagatattaaaagtttttcaaatgcagttcattgaatgcagccctatagagaagcagctgaagtccacattgtagctgcagtgtggctggccagctggggtctgtttccttcacacaaggaggtctcagggtacattcccagccatggagaagagacaacacatgggaggggagtgcgtataatactctgggctgcagaaagaagccaatgtaaatggctttttgcttgatgtctttagttcattgattttaggcctagaaagtcgtgattgattacatcccaccaaatgcaggctggggaagtcagtgtgggaatttagagcatggctgatttaataaatgttttcagaaccatgtattcttctgaggcatgagaacgatgagaaaaagaacactggtcaagagctagcagagctagggtctggcttcatttctgtccttgattagctgtgtgactttgagccagtcatttaacttctctgaggcttcaacttcacagtgaggttgttggagccgtacatctcagtactagcattcaatggttccatgaaaattcacagtgatccccatgaggtcagtgtccacccatgtagcacatgtattttgtttggcatgcttgctggggagaggagaatcacaggaaggcaacaagggaagaaaattttaaaaaatattggatgttctcttatatatatcatccagggcttcatccgtcatccaggggagaactagagatgttttaaagacttgagacctccactgcctggtcctattgaggatcctgtgttaatgacagttttgccatctctaaatggcattgaaaatccagtgcctgggaataagtaggcaggggagtgcctggggacatggccctgttataaggtagtggtgtttgtttttgggacattagccctcttcccattgtctgttatgttgaggtcagcttccatgtacatttccctatgtctccgagcacattctgatcaattcattgatggtgagagggaaggaaagggaaggaaatagacatttttaaatgcctatgatgagctccctactgggaaggatctgtattcacagccatcttatggggcaatcactttacccacattttatacattataaacctgaggcttggaggtgttaggtaagttggataaagtcactaaattattaagaagcagagccaggaattgaacacatgtctgtgtgagggcctgtgttttatttgccttggcatcctgcccttatactatgacagctctgggcatgcattgtatacaatacaccagactgatggaaagtagcagtggaggaggggaggatggggataaagacaactatgtatcattcttattcttgaacatattatctaattagacaaataaaactaacataaagggaatacctatgacaagttaacaattttatcaacaatataaaaattagagatacgatactagcagctaacatgtattacacggtatatgccacatactaaagactctacaattgttttctcaattgtcaccatgatcccatgtccatatttcattgacgaggaagctgagacataagagagttggaaactctaccaaagttcacagcctttgggcttccagcagtgagccaggattccaatccagcccaactggttccacgcggtactactgctggtgttatttgtcatcaaataagggaacccaaggcccactgtaggctcattaggaggggtgagtttggtctgaaatggtcctggcggactgaagggaggaaatgaaactcaaaaagcctgtatggaaatagccttgtggtcatatcagagatcaggtttctaacgcaggttcttaccacctcatggtaggaccttgcagtaattgcagggcttttcccacacctcctctcatgtctcatggctaacaacctgttttcttctgcattctaatctcctgagaattctctctaaaatggaggggtcattagaaggcagatatttttggagcatgtcttccctggggcaagcaagtgcttggaaccaggggtgcagggaaagccgtacgaatccacacctgactgtgggacagtaatagggtctgagagtgttaggtcctgcaacctttcttgaagcacagataggagtgagtacagcagaattacggccctggattagtccaactggcattgctcatgtaaaagcaagagctttgtcaactgcaatcccactttaaagggtgtgtgggattgaaacaagatggcttgaaggaagagaccagtgcctgtgctctgtctttgcattgcacacaagtgtcccttgtcctgaaagaccaggtggactggataactgcataacaaagatgggtgctgctaagggatgaggggatacaaaaggggagaggctacaaatggcagagccaggtcaggtcttggagagtaactagtcacagattgcagtcagatcctgggctaacatattttaagtgaaaacaatggatttaaatgccattaacagagcatgtattctccaggttcttttataccagccagcttcactcattccagtgacgatcttgtcttacctcctctgtccctcactccttcactcttgccccagctatcccagaatagcttaactacccagagttgcatatcaagaaattgtgagttgaagagaataaagtgacttaaatagatgactgtttatggggttaaaatacaaaactacattttctgatttctagtttgatatttctccacaatgctgtactgaaagctggatttttctgtctttaaggcatggagaaaagtgagggagtcttggggtttctcagaatttgaggcaacatccttaacattgggcgaggtagtctggctattaaccatgaaaccctatggagtgagcttagttgaaggggactgagcaagccatttcagagcccagggcctctgtgacaaccaaacacatttgctatttggaaaataattatagatccttttgagagattcagctgcggataaaactggaatactctggctagaaaagtacttgctatgaaatccattcacctagtgtgatagattgttaaaaatggccacttttattctatccctgtatgcatgaatcccccctgcctcccgcaacccaacccagcaaggtgtctgtaatattcctcctatcaagagtagagtttctctacccacctcttgaatgggggcttgaccttgtgacttgttctggtcagtagggcgttagcaaacatgatgtatcagaggcttagaaagcatttgcatgtggggtcctaccctcttcttgacaccctaagactgccatgtaaagagattggagtgccttccggaggttgagaatatttggagcagacaaaagtcatcccagcagagactccctggaccaacagtgaaggtacctgcatttttgctaaaaagtccaagtggaagggtattgttatatgcagtcctatcatgttttctcaaataatggggaaaggacacaggtgtccatatatgctcgtgaatccagccgtcttcattggaaaacgtgtggcctgcagagattcagtggaatgatcttaccccaatagtccaggacagtggctctcaattgggagctattttgactcccaagagtcatttaataatgtctggatacatttttaatttttgtacccccagggcaggagtatgctactggcatgtagtagatataggctagggatgctgccgaacatcctaccatgcacaggacagtccccacaaccaagaatgatcaagtctgaaatattgatagtgttgaggttgagataccctgatctgggcaattgttgacttcatgtcaggttttacagagttccttaacatatctaggcaatacttcaccagactccaaccctagcctcatcttcttcaagagcaagttctctctttgggagtctctgaagagtccgtcaaaaacatttcttaacatcctaagacatgcctctttagggttggataaagatgattttctaattttaaaatgccttcctagccccagattttgtgcttatattgcagagaagtagattgaataccggagggaaggacatggatcaaggtggaaagtcagacgtaagcagagctacatttgcagaaagtatgagttcagtttagtttttgcttatggaccacaaagatggccctcacctctaaaccttgaagaattccagaatttttctgggagaggaacatctctatcacatctgccacagcggaaggctttgtgcaggataacatatcattggcttgagaacagagtgagcatgtgtggaagggcctgtaattattaatatgacattggccataatttatcatgtcataccacccacttacagcagcctcatcctatgaaatgctaaatgcctttcttatcaacacttgatgggaaaatgctgttctggcatcttcctctaagggaaacagaaatctaaccatgttccttacagcctagaactctgtacacaaagatcagacttgtttttctccctgaaaatttataggtatttacaaggactcatatcctgtttgctatttagaggggcaatggagtgagaaagaattatgtagcaagtttctttttcttgagatttgctcaagctgctctatgacttaaaaaaactcagatattactccccatttttatgggcagcttgctgttttctattcttgctttcctcaccgactttcttggcaaagctatgcttgagtactcctagcgggtggctagattctcagtgagatgcttctgtcataaaataccctagaaaaggaggttcaattcatgatccagggtgaagtccttgtgttttagtcctattaaattaaagaaccaacttttgctgagtgttccaagactggattctttcttccctgttgtcgtcagctctcagtaggtgcagaccttctgcagaactccgatggcacccatgaaggaagaggaatccactcttatggtatcagagctttatgaaccctttcttaatattagaatggaatcctacagccaagagaaaactgtgtctcacattcaaagaggcagacattggaaggaaaatattcaccttctgacaagttttaaagaaacagaaaatattgcttctttttaaatatttgcctgggtttgatcacttaatattttttaataggtcacaatactgcatttccaggtagatcgactaaaatgcttggagaatggttctgtttaatttatttgcctagttaacttacagcaaaccacaaattatttatttatgtatttatttattttttgagacagtttcactcttgttgcccaggctggagtgcaatggcatgatcttagctcactgcaacttcagcctcccaggttcaagtgattctcttgtctcagcctcctgggtagctgggattacaggcatgtgccaccacgcctggctaattttgtttgtatttttagtagagatgaggtttcgccatgttggccaccttggtcttgaactcctgacatcaggtgatccacctgcctcggcctcccaaagtgctgggattacaggtgtgagccacctcactgggccacaaatttttcatttaacacagttgaatatgatttcatgactaaggttctcattgctgagttatcattcttcagctggagaaggggagagggaaggtgcactgattcccaaagatcccctggcatattgtgaagcaagattgaaagatgtatcctggaaaaaattcattagtttgactctctttttaactgcattcctataaattgagactctactcatttaaggtggttatgagaattgagtggatataatgggatacagagggtggcacattgcaagctttgatgataaattatggatgttatgatatgtatgtactttcatttgtaagtaatgatttttataaaatattatgatacatttctaggctgaccttgaaggagaatactaacataactttggaaaaccaaaaaatgaaaaaagggtatccgtttctcatcatgaataggtttcaaatctcgtatttggagcatttcaatttaagtttgaagaagcaggactgaggtcacatttttctccattggacattctttctgatgaataagtattaaaactgctttgaatttggtttcccccttagataagaaattattttttccatacagtcttttctttgcacctgaaggagcattgagggtgaaaaatagaggcctgtttcctgttcctaactggagccctccaaggttgtcaaactagagcaacaactttgtgggatttatgcctgggacctgtcaaagtagaattatcatagcaaaccctctctgctatcaatcagaggggtattggggatggcaagggcaggcatttttcaaatttctttactgtgcatatttagtcttgtgcctgggggaggaagagctcctttgaacagttcttgtagatttcttttccatcagatggcagctcacaaaactacttaatcttccccaaagggcttctctcattggcctgctgagaaaaacagccaaggaagagagagtgggggaagacagggacaatccaacagcaaatcctagaaaataacgcattgctttcagaggacgtatggtctaagtctggtcacactgatatcatgacttagaaaagcacactgtccattgaaggttatctcccgtcgcttctttttttttttttttttttttttttttttttttttttgagacggagtctcgctctgtcacccaggccggactgcggactgcagtggcgcaatctcggctcactgcaagctccgcttcccgggttcacgccattctcctgcctcagcctcccgagtagctgggactacaggcgcccgccaccgcgcccggctaattttttgtatttttagtagagacggggtttcaccttgttagccaggatggtctcgatctcctgacctcatgatccacccgcctcggcctcccaaagtgctgggattacaggcgtgagccaccgcgcccggccctcccgtcgcttctaagtatcatgtggacatttagcaacagcacaaagctgacagtgctatcatagcggtgtgagtattcttctgtcctccagagccatttcccacatttgtcaagacaaaggttgaaggggaccggacaagggaaatgggtcacccattcattcccatctgtcagaggtttgctttgtcatgataacattcaaggagcatgtttatctatcccgctactggaggttaaggcaagggtaacaagaagagaagaaaccctgtttgaaaagtttacaaatcctgccgtgagggctgtaaacagagtccagccggtggtggagcgtgttaaatactgccacattgatagggacctggttccccggcactagaaatccactcatgtaaacagaggaactgttgctgtgaatcgggtctgttttgacttaaagtctaagaaacacattgccttcaaagtgaattcttaggtgtcacttcccataagttatggcagaagattacaaagctactgatataacatattagtttgatggacagaattatacccccaacgcttcctgctctccccaatgacgcacactaacttagtgtactgtgacagctgccttgatttaccaccagtccgggaggccaaccgggagaaggaacgttcacatggacgcagggcctgagactggcctggagcctagtttataaagctgccctgtaattcaccacaaatgtgtcaccattaaaagaggaaaaaaggattgcagataataaatactctttaatttattagctaacaacaaagagatcagagccagttgtgatgtgattgtttgacataatattgtcaaggaaaaaaaagctaagttgaccagagaggtaaattacacattcaagcagatgcatcaactcttggcttgtcataagcccagctaaacaaaacaccacacagaggggaggactggccaagagcagagccatttatctctgaaagagacatattcaagagcaagtgaaataagacatagttcttttggacttggtcagaggccaggttttaactgttataaattaaatgttttgtgtataggatttggcaattctagttgcctttgtcatggtagggagatgttaggtttttctgcctgtcttaaactcatggtttggtcagctggggtgtgtgtcctactgctagatattggaggatcactaccttttggtaattagcagatattgggaaggtttctgtatgtggcttgtgataaaatcagtggctttagaaaaacttgtaatcgccttcgttttctgcaattcttcctctacagttgttgagcaatactcacacaggtcaccaggcaggaattcatattgatattagactcgtggaacctgaggattggaagaaacatttcatcccgcatcccacccaggacatgcagacagttgtgtatgagcggggcaacttccagggaggccaggcatctgccgtgtgttattgtaacatagctcagagtcaaccagtgctttctgggcttttatttttatataagcgactgcccagcaaaactctcccatcccttgcttgggaaattgagttttcagatctaagtgggtacttttgctttgttttgcatattatgggtctttgggtttagcctattgttagaacagatttctgggttttattcaacagtctggaggcaaggatagagtcctgtgggtaggtttaaggacattgattcatggatcaacatttttttgatgtagttaattgatctgctatgaattgcatctcatttattttatttgttgcaaagcaatatcatgggggatttttgttagatgtcttattgaaatcaatttataatgtttatggtctcactgatctaccagctgaataactgtttctaaaagacagagctagaaggcagggagggagagagagagagagaaagggagtggagaagagagggggagagagagagagagagagagattgatttggcctagctcattctaggtaaaaagatgtactagctcttaaaagttgctactatcttttcaacgtgctcatatatcatatatttaacataattttttacaattttagtgtcattatttttagaatcttctgttcctcctttaaaaaatcaacaaaaatatttgcccaaatttgctttttatctgtattttttcaaatattagtaacattgtttccatgagcagatctataagaatttttttgttgttgctattgtaaaataagatactatttgtataggtctagacaccaggcatctcctatgtctcataagctctctagggcctcattcttccatttcttttttcttttttacttttcactcatcagtctagcccaaggatataatttcatgatggagaaaataatgacaaaacaagagcttagttttaatcattctgcctttcctctgtcatttgggatttctttttttaacaaccattttccaacagtagacttattttcttcctttgagcatggttttcataagtgacttcttaaaatctgaattcactagaatatgccccatacagttatactagtttggtttctttcactgcttccctatcctcaagcttccccaaccttccttccttgttgtcaatattcataattatatactcagaatttcacttttagtagcatccttccttcttgaatttcatgtcctattaggatcaatatctgtggaaattactatactatactatactataccataccataccataccataccataccataccataccatcctatcctatcctatcctatgctatgctatgctatgctatgctatgctatgctatgctatgctatgctatgctatactatactatactgaaatgctatagtctcttaaaaataaagcaaatccaatcaagagtattcatatatttgtgttccaaaatatgcaaagttatctccaattaggcacggtcactttctcctaggggtctcatatcttccataccaccaatctttttattttttaagtttgatcatgttggcatttgttctgctatataatgtatattatgttgctactttttgaatatgttcactaaatgcacttctgcctgattttcctggtttccaaaaaggattttccctcttcacctcttctcctctcctctctctctattggaaatacctttcttttcagcaaggtgttctcttccactgtcacattctgggcatgattacccaccaccgtgagtttagttcaagttcattttattttagaagttacgaccggttttataggaacaatgtgcctttatcatgtcaactccatgttgaaaaacctttagggcctcctcctcgcatttgggttacagccacaaacccttagcctggcttctgaggtccacttaaccttgaactcaatgtacttttttggcctaaccttccagactttccctattttcactcagcctttcaaatcaactgatctgctcatagccagcaacatgatttgttcttttattcgttcacctctttgggctttccccccagaccttttctagttttcttaattagaaagtgagtcaccaaaaaggtcattaacatcaagtctttcattgccttttgtttttttctctatgaagaataaaataattttatggtgcaaaatgaacttttgaaggctaagaaagaacataaagtttgggccaaccaaaattaaaagtgactcacaattaatactaccaaagaaggcaatcttccgctgtccttaagtcagcaaggatttatgagagtgcttgatgattgtgtgttgcatttcctctgttggaaatgatacctagaattttagaagcatagattctgaaggatgacttcataataaggattttaggagcccactgttacccatctcaaccttggatgcctgaaatacactgacattcctacacatggctacatatcattcttattattcagtccacagccattgccaggatagataaaaagcaactgtcatttcacatcagaccaagctaggaaagtatatctttcctcaaccaagaagatggagtatgaaccagaccacatggcccagtggatgggaattgatagtgcatacagtagctttaaagcagcatggagcaaaatagatttaaatcattccgaaagaaataaatcctaacaatggatacattgtgctgaatgaaatgaagctcacaaaagaattgattaggaagtataccaaatggaataaaatgtagcagaaaggcacatattagagagaataaaatatgtttcagtctgaaggggatttaatttactaagatacaactgaccagctataaagcagatgaataacatatgtagtcaagtcaaatggacattcaatggaaataggtttatatagatcaatggcatcatgtgaccagtttcattcttctaattctatggctcattgtgtaatatctttagctctctcaagaaaatctgaggcttttcctgaatcctgaaagagggaactcaccttaaaggagtgtatgattaattggaaataggttattgtttgttggcttgtcttggtccagagaaccataataattttctggaattagaaggattttacagtaaattgcaatagagtatcacagtgaagactatttaagcactttttcctccaatgttaagttagttctactggtcactgtgctgaaatacttagagccatcaatggtcttcatttctctttctaggaaacttggaaattttaggtcaatattgaaattatcttgctgggaattttctcccacatgcaaacatattcattaaacactctgttgtgcttcagtcggagtcctttggagaatgtaattctcaacatgaatgaagcttatttccagcgttattcacagtggcatatcaagggcaggggggaagacagtggtctgctccaggtacagacaatgaggggatgcattgtttgtagaaagttttaaaacaataataaaaccaactaaaattttgtgtatattctgttatcaccatgaactggcaattcaggcaattaaagtgataaaaatactcatctctggaaaaaagctgtcaatctaagttctaagtaattgccaggagttctgttgtattttaaaataatgactattattgttaatatttattacattttaacacacttaaaagtttatcttttaagacacatcgtattctatatggagttactctggggaactcctagctctccaggaagccttagcatacatgaacttagctgtaaattcacagtggtttggaatattagagatcacatcacagtcagtgtctctaaaaccttggtagcatatatttctgcatttgaacaatatatttgaactaggcagtcgtagaaaaatgattgagagataaagaaacaggtcttgagttagttctgtcattcaatgagactacttggagcatttacttgtttttaatatttaaaacaataaaataaaatacaaaccatgaagtgtactattttgtctttggtaagtgcaaatttaagtttatgcatgaagatctctaatatatttgaataatagctttacattaaaaatttaattttctttttaattgttaattatttcaaaacaaaagcaaattaaaaaaataataattactaattacgtgcttataactgaaaagaattttgttttatggaggaaggggtattaataattatctgctctgggtatcaaatatgctagctatggcactgggtattttctttttcttttttttttttttgagacaaagtctcactcttgttgcccaggctggagtgcaatggcatgatctcagctcactgcaacctctggctcccaggtttaagcaattctcctgcctcagcctcctgagtagctgggattacaggcacccaccaccacacctggctaatttttgtatttttagtagagacggagtttcaccatgttggccaggctggtctcgaactcctgacctcaggtgatccacctacctcagcctcccaaagtgctgggattacaggtgtgagccacggcacctggccagcactgggtatttttatttttattttggttacagatgataaaacaattcaaattgctgaaaaaatatgtaatttaatactttatcaatttccttttatcttgcaacaaaccacctcgaaatttaatggcttaaaataagagttatatataaggtcacagtcctgtgggttggctgggtgcttcttatctggactgacttggttggggctggatggtcacaaatggcctcacatgtctggggctcagttgagatggctggaatagctttccatgtgatctctcttcttccagaaagctagcctgggcatgttacctggtgggagaaaggttcccttaacaggagaaggaaaactccatgctcaagtaccttttaggcatttccttgtataacatttgttaatgactcattggacaaaacttgttacatggccaagtccacatacgaggggtggagaaccagactctacctcttgatggtaaagcagtaaggttacattgcccagggaagtatgtatagaggtaaaagaaatttttgcagccttttttgtgaataatctaccacctacccataagggttgtgttatctccaggtattcaagtaacattggcagtaatttccatcttcatacttcgtctcagttctacttttttatgtagttcatgtagcctttttaaattaaatgtattttttttacttggcatataatacttgtacatatttatgggatacctagtgatgtttcaatacatataatgtattgcatgatctgatcagtgtaattagcatatccctcatcgcaaacatttttcatttctttatgttgggaacattcaatatccttcttctagctactgggaatgatataatatattattgttaactgtaatcatcctacaatgtttttttaacatgagaaattattcctcttatctggctgtaatttttcatcctttaacaaatctccctaaccctctctttgctttacccttcccagcctcttgtatcatctcttccacttttcatttctatgagatcatctttttttagcttccacaatatgagtgagaacatgtggtgtttagttagttctgttcctgacttatttcgcttaacataatatcctccagttttatccatgttgccgtgaatgacaggatttaatttatttttatggctgagtgatattccattgtgtgtatatatatcacattttctttatctactattccgttgttggatacctaggctgagtccatatcttggctattgtgaatagtgctgcaataaatatgggagtgcagatgtctttttgatatgatgatttcctttcctttatatacattcttagtagaaggatttctggatcatatggcagttttatttgtagtttttaaggaacctcgatactgttctccatagtggctgtacaaatttacattcccaccaacagtgtaaagagttcctttttttctctatcctcaccaacatttgttattttttatctttttgataatggccattctaaatggggtgagatgctatctcattggtgttttgatttacgtttccttgatgattagtgatgttgggtatttgaaaatatatttcttggccattcgtatgtcttcttttgagcaatgtctgtttagatcatttgcctattttcattcttaattttttccttcactcattggttgttcaggagtatgttgtttaatttccatatattcatacagtttccagcattccttttgttattgacttctagttttattctattgtcatctgagaagatgcttgatataattttgacttatcaaaatttgttgagacttgttttgtggtgtaacatatggtctatcctggagaatgttgcatctgctgataataatgtgtattctgtagctgttggctgaaatgttacctacatgtctgttaagtccatttggtctctggtgcagtttaattccagcatttctttgttgattttctttctagatgatctgtccaatgctgagagtaaggtgttgaagtccccaactactattgtattggggtctatctctccctttagatctaataatatttgttacatatatatatatgtatatatcagtgttctggtgttgggtgcatatatatttacagttcttatattctcttgcttaattgatccctttgttatcatataatatccttctttatctctttttagaactttttacctgaagtctgttttgtctgatataagtgtagctacttatgcttgcttttggtttctctttgtgtgggatatctttttccatcccttcagttcaagtctacatatgtctttacatgtgaggtgagtttcttgtcaacagcatataattggatcttttttttttaaacccattcatcctgtctatgttttttaattggagaatttaatccatttacatacaaggttattactgataggtgaggacttactcttgtcattttattcgttgtttcctggttgtttggtatattttgttctttacttcctctcttattatttaattttggacttagatgttccctgtagtgataggtttctcttcttcttttgtgtattgccttgcttcttttctctttcttccttgtgtattgtccctaccagtgagttttatagccattttttgcatgttttcatgatgatgatgaagattttccagatgtaaggcttccttgagcatttcttgtaaggccaatctagtggtgatgaatccacttagttttagcttgtctgaaaaagattttatttcttcttaatttctaaaggatagctttgctaggtataatattcttggctgacatttttttttcttttagtactttgaatatgtcatcccattctctcttggcctataaggtttctgcggagaaacccattattaatgtaatgagagttcccttatatgtgacttgatgcttttctcttgctgtttttaggattcaatctttgactttgacttttgacaatttgagtataatgtgcctccaagagaacctgtttggggtgactctatttggagttccttgatcttcctggatctggatgtctatctttcttccaagacttggaaagttttcagctattactttattaactatgttttctgcacccttttccttctctgaaatatatgaactacacaaattcatatgccatccttgtgcaggggccatgctaatcttctctgtatcattataatttgagtataggtaccactgaagtgagcatttttaagaaataaattttgataagatggccaatatcagcaaatggattacttcttgccagcttagcaaccctactggaaagagagcttgttccaatagttcaagacaaaatttcaagactgacttttattggctggattgacttgcgtttcttttcttttcttttttttttttttttttgagacggagtctcgctctgttgcccaggctggaatgcagtggtgcgatctcagctaactgcaaactccacctcctgggttcacgccattctcctgcctcagcctcccaagtagctgggactacaggcgcctgccaccacgcccggataatttttttttttctgtattttttagtagagacggggtttcaccatattagccagaatggtctccatctcctgacctcgtgatctgcctgcctcggcctcccaaagtgctgggattacaggcgtgagctactgcgcccggctggcttgcgtttcaatctaagctaatcacctgggtcagacccacacctcgtaccaggaactgggctcatgtccatcagaatcatatgaaatgaaaggtggaaggcactggttctaaaaaaaaaatgacaccctagttgttacaaaatgaacagtgaattaatgctgggcatgcaaaaataagagcctttgactaccctcttgtgcttaggtcatagtatcaaggagataactagatttaggctttcctacttaggtttattgttatttaaactcacttctcataagccttgaaaagcaacacacatgccttcaataatgggtctgcaagttgaactttaaatatttgctttacatattttttgaaagtcacatgtgcaaacatttttatatacatacttacaaaggtagataacatttctgcaggatgaacccgtcatataaactcattgatgtgccacatgtgcacaataggtggattatgactaaaaaacaaatttagaatgacatttgagcaatcttgataagtttatggagttgttggagaaggaaaaatattagtggggaagaaaattgttggcaataaaattagaaaacgagcctcatgtaatcccagctacttgaatggctgaggtgggaggatctcttgaggttaggaattcaaggccaccctgggcaacaaaacaagaccccatctctaaaaaaaaataataataataaattaatcagatgtggtggtatacactggtagtcccagctacccaggaggtggaggtgggaggatcacttgagcctaggagttcaagctatgtgcatgccactgtacttcagcctggacaacaacgtgagactccatttcttaaagtaaaccaaaagccttcaaatgcatataacctaaaatcaggaatcaccggggttctcagtgattgaaatctttaccaccagtgttcactcatgctagcctcatactcccagcctgctccactcatgtacgcgcttctcatcaacatgctttattttctgaatgattctccgtgaaaagaacaaagtggggtgatggaaagtatagtcacttggcattcaggtttaggttctggctccggcaccgtgtgaagtttatgagtcttttcccatttctgggtctcagcttcatcttctgtcaagtgaaagattagggtaactgatctcaaataactctctggcatatatgtgttcggcacctacatcttctctgattggtcctgggttattcaacatctttcctctgcaacttatttagccctaggtttggggaatgggcactaacttctcctgtacagattctttcccaagcttccaaatccatggcctttagttttgaggttctgctggcccctgtttttttccccaaagcaaaccctcttgacaaattcatgctttccagcaagcttaccagggtaagtcatgctggccagggtgacttgtgacactctgtttccacagctggctctggcctgtgcctgactgctgctgtgtctgattgttaccagccatttgccctttcttaagcccttgctaaccattttctttacagaatatatatgttatgtgccctagcataatttttctcataatgaaatagaatcattttcatagaactttgcaatgttgttaacattagcattttggggaaagtcttctttatagttgtttataatctcattttcaaattgaaaaaaaattcaaatgctatttttagaaggatacattccaaacattaaatgattgatctttactttggaaggtacctcttgggtcaccttttcatctctagggagttgattccaaggcaaacttgtttctgatgaagtgtttcaatatgctttattataatctgggaccacaaaaggaacttctaacaaacttttttttttaaaaaaagatcatctgtttatctcattctctctctttcttatgcttttgcaaaaactttttatcagtttacagcaatatgaaattcaaagaaaaatcaaaatagaaaaaaactctccagtttgaaaaatggagttgatgtgctattttaatttggtgatgattctactgaggcattgtttccaggtttgcatgatggttactttatcttttttgccttttagactcaataagatatttctccatagcacattactcaagcttctacataactcatctcacatagttacgaagttttgtccccttggactgtaagcccaggcagggatgggagcttgttcattcttggatccctaccgtcttgcatagtgcttgctatgtagaaagcactcataggctcaagtggaagaatactgtgtaggagcaagaataatatgtaggggtaaaatgttgaacatgcataaatattgaaacaaagaaataaattgattttggtgataggtgaccctgagagggataaaagtgtaacccagaggccctcctatgttacagtggcaaaacctctgtcaactctgatgtcttctgctacaggttaaacaagaatggaaagctctattcaaccatctaaaactctgccttcataataatgatggatttgctgtcatcataactcattcgtaggtaatcttgcaagagctgaactttggaactactgccatttggaagggttccattcactctaagggaaacctgagaatctgagttcatttactttttattcccccttttagcagtaatttgttcatttacctttaatgttgaaaggaagcaggttgaggccagccatgatggctcacacctgtaatcccaacactttgggaggccgagaccggcagatcacttgaggccaggagttcaagaccagcctggccaacatagcaaaacactgtctctaccaaaaatgcaaaaaattagtcaggcatggtggtacatgcctgtagtctgtagtcccagctacttgggaggctgaggcatgagaatttcttgaacccaggaggcagaggttgcagtgagctgagattgtaccactacactccagcctgggtaacagagcaagactctgtctcaaaaaaaaaaaaaaaaaaaaaaaaaaaaaaaaaaaaaaaaaaaaaaaaaaacacggaagcagattgaaataatgtgttttccatttgcaagtggcatggtcattttagttgaaggcatgtccactgcgagtatttcggtcagcttggctgcttctcatgctgtttgcccaattcagcactacagattttgctctcttaaattccagctttatcccataggagaggtgcagatttctatttctcatctctcgtctgttttaattctttgggagaggagtcctgagtactaaacagaaaggtacgcatggagaaatgtaaaacatattttcaggcacctttgtgaaaggaaaatttaatgggacattatagtactatgggaaatggagagagataagaatcatgccccatgcttaaccttttggactcatctttgccaatttctatgtgcagttcagtaaattaaataagctttccttagcctgaaactgtctgtgatagtgcaacctttcactgaggtatcacagacagacattcagcgttcaagacaggggcctgacacctttcaaaagtgaaggaacctgtggcaattttaaacattccaaccatattaattccagtgacagttatcctctaagttatttgaaatggattctccctcttcaactttcgaaacttatatttgatccccatggcctctggggcctgcacaggggcactctctgtgactgagtgcgtgaacagcaggaggcagaagcaggaaattgttgatccggtccgtttatgtctttcctcctcctttagctgttctctgtaccttattcatgtttctaaggaaaagccttgcatttccaaaagaagggttgaataacggtttggagttctttctttgagggcaatgtttttattattgctcttccacccaggctgaaagttgagtgtcatctctcaagcataagcaactaggcacttcacaatcaatactgggctcagtggttgagccctggttaatagagctgcttcttttcaggtgctcacactcagcgcagccgaattctgccttctctgtcctgggaggacacagggacctgtgcccttctccaacagtgggatcattctcgggaagtgctcctcactttccacatggtcaggaagttttggatgtctataacaagcacaggcgaggcttggtatggagcccagtgtttatacttaagagagtgctgggggaatggtcacagaagacccatcaggcccttatgggctgagttccaaggtgactgtacattggttattgttggggaagagtcagatcttcagctttccatgtgtgttggtttgatgttattactagtcatccatgtgttagaaatgaccttattagttcatgtctaagaaactaatttacaaaccaaaagactaacatgttatttccatttgggtgagggatagtattcaggaaaccaccagactgttcacatttgcattctagggacctcccttcctggtattagactaactggcaaagtaaattaatcatctgcaagatttctaagtgagaatggatgattgcatagctgttaaggttacaagtcaaatagcctgtgtttggaatcctggccatcacccttaatccctacatgatctcagaccagttacttaccctctttaagccttgattaactgatctagaaaatgagatactaagagtacttacctcatagagttgttgggaggattaaccgggataataaaaaagtgtgtatgaaaatgcttggcatataataagtacacaataaatattcacactagtattagtagtataataataatcatctttttttgtaataaaggtaattggatatgttcctaggccatttcatcctataatgttagaatctggagacttacacctgcttctccatagaatactcctttgcaaggacaggattacctgttagctgctagaggaaggctgacaatttcttatttatcaactcttctttctctagatcctgtgttgcttttttgtgtttatgaatacatatttaactactgtttatagaatatttgctatatgccgtaatattgtgctcttcatcatattacctaatttagttcttgcaatacctgtttgaggaaagagtcattatctccatttttcacaataggaaactaagtacagagaagtaagaaaagcgaggaggtagaacagctggggcttcagcttaggtctgtctactaaattccatgtctatgacactaggctatcctgcatctttatttataactcagtatattagaccttgagttaattagattattactaattttatatttattacaaagtggcatttttgatgagttttgagaaatgccctagtatatttacatacattgaatggatgacaatttgaaacttaatttcaaaatttcacaagttagaatttaaaaactagacttgtaacaggagatgagtttgttttgattccggagaacattcaatctctgggtgatgatccaattaatataggctagagtttcccaggtagatcttatgggaaaatgatacaggagggacacattatcaagagtgctgataaattcaaattgtaactaacctcccttagatagacccaagatagtcatgcctccttctatagggactctttggggcatgatagaccagatgccatgataaagaatggcattcccacagttgagatgaatttccacaggtcaccatatgcagcttcctttctcagcaagaatatccttaactttatgcacataatttttttttgttttttttaaacagctattttgaggtataattcacatactatattgtttgcccattcaaattatataattcaacaatttttgacatattacactacaacttttaaaattgtggtaaaaatatatataaaaaatttaccatttaaacttgtaagcataaaattcagtggcattaatgatattcaaagtgttgtgcgaccatcacaactatttatttccaaacccttttttatcactccagtagaaactctataattattaagcaataactccctatttctccactttccagccctggtaacctctattctatttctgcctctatgaatttgcctgtctgcttcatgtaagtggaatcatgcaatatctgtccttttatgcctagcttatagacataaaccttgaaaacaagatttatctatgtggaagcctatttcagaaatacattccttttgatggctgaataatattccattgtaaacataatattctggaatgaagatgtggattccatctatagctgtcaatcttgtgagtaaaatcaccagttttgtgtgaaatgtctcatttgacacaaccaacttggaaaacatgttgaggatatttctagaatggtacccaatctattgacccttgtattattatttattcggtgtttttcttgaaatcagttcacttttaaatgtcttaaatatttatcttattttgtcctaattaatgttcatgaagtccataggttgacgtaatattacatattgctattaaaatgatttacatatatttgttctgtatacctcctaaaatgtatcttctacctcagccacatataggctgtcaataacttctctaattctcaaacttgaggggtgggctgtgtgtcagaacatactagagtgccagattccctatggaacagaaatgaagaggagaggaattgtaacaaatataacctggtgtgaaggccaaggttaaccctaacccaaaccctaaccctgggagtcaattagtaggttcaagtctgggctaaaactgcttctaatcagctgtgtgatcttgacacatagtcctctgtgccttagtttcctctctgtcttaagcaggttgaagtagatcatctcctcctgttgctcattcctggatgtcctgcttctctcccacattcaggaatgacagggctagtgtgtgcttctgcacttgccctccatggggctgtactggagggatttccatttctttggcttcatggtatttacacctctctcttttcacttctctcacccctcttatattagatcaaactcgatctgatgtaactcttaatgatttcctttttaaggaggacattaggaaagcctgcatcaaggacatcacttaccttcatttagaactgtgggcatctgcactgtgtccatttcttacagcgataaaatggcagtaaatcagaaaaaatgccatgcccttcagaaccttgagaatgagctcctgagcattctgcttacggggatgtaggcttgtcagtgagtaaatcagctctgtccttacgcccccattgcatcagggaaatctctgactttgtgggataggtttgacgtgtcagtcaatctctctctacccccatttgagactgagagtgtatctctcctgtgttttctctgagcgtgtttagtgagcttattggccccctaggtttcattgccagccacagcttagtccttgtcagagagattattatatgaaccctaggtgacttctgactgcagaagggccctggatttacatttttgcattccaaagtcaggaatataaatgactaatggaacactgggccaccgaatatttatatatctattttgaaatttacatttctccctttcttatgatggggtttgctgctcccggggtcgtagttcatgggccagtagcatccgtggtgacaaagcaatcatctggggagagtgcttcccagccccagtggcacactgtgatgtgctgcaggttattatgccagcaattcagcagtaatcgaaccccccatctccttggccctatccctgcttcccttttatgatgtccaataaattttacatgctccaatttgcctcatccaccacctaatactgtttgaattaagaatctcttccatagctttcaacaatgggaactttgctttctccaaaattatttataaaggccactcatgactgtgccagaacggaggctggactgtgcaggtagagacagtgcacatatgctggtccatatagaagatggggttgcccagttgttgaacttgctgactacatgatatattgagatggaagaggatgtctatagatacatactatatctatatgtatgtatgttttgaatgaaaaaattgtgttaaattaggaattttttaaaaggtagagcatccatttgaaagttccctggtccctgatacttttcacgatatatggtacatttaataatagcagtaacaacaataatagcaacactacttaagcgtttactactcgctgaattattctaagccctttgcatgcattttaaaattccaacagccccatgagattgagcctttttgtaaacctgcttataaaggtggaaataagttcagagaggttaagttcctcaagattacatagctagtaagcaacagggctaggactagatgttgtattgtctgatacctgtttttaacatcacctaataccaccatgtggtgtaggcaggaagcagagatcttgagatgaatgttagtacatttctcattcactcaagccactcaccttttctcattcactcaagccactcccctttttgttccccgtcagtatttacaaagcatctattctgtgcacaccctgttctgaacactgggtatcaatacagcagtgaagatgacccgcagtccctactcttgtggagttaatattttaatacttgtagtcagacaatagacacgtaaagaaataaaccatgcactttctaacattggtgtctcaaagaaaatgcatgagagcaacgcaatggaaagtgtccagttggggaggggagctattttcactaggatgccaacaaaggcttccctgaagactgggcatttgagctgagacctaaatgtgaagatggctgggagctggtgtatggagcatagggttcgctagaggaaaggcagctgtaaagacccaagtcaggaatcagtgtcttgtgttggaaagccaggaggaagaccagagtggctgaagcattattagctgtagagagagagtagattatgaagtcaggagattggcagacctcaaggcgtgcagagcagggcagggagtgtggatgccgtggtgttttcagttctttcaatcaatattttactgcctgcagcccattttcttttacagcctgtcttcttttccttctgctttgactcgagtcttacctcataatgggcattttaatcctctctgtgatgcaatccaatgcttcttgctgggcaccttgctttattccagctcagggcagcattaaaaaagaacagaggaagtctccagccgagaggggctcaggaaggggtgcaggttgcaatctaagagctttaattaaatcaatgccgtgcacatcctgtccacaaagctgggggcaattgcatgctctttactgacgccatgatatacacttaagagctgtgtgacttcacagaagcaattaaattggcctgtttaatcagtggtaaggccaccatcaataacaattattatttttattgatttgataagtgcacagtagaaataatcacagagaatagctgtctctttccccctgtcctttgcctaaatgctaaaccctaggctacccaggccaaatctatagtgacctcttgaacagttttactacagatccatatgtaatcaagaattcctaccttggctaggcggctcacgcctgtaatcccagtactttgggaggccgaggtgggtgaactgcattaactcaggagttcgaggccagcctgagccacatggcaaaactccatttctacaaaaagtacaaaaattagctgggtgtggtggcatgcacctgtaatcccagctacttgggaggctgaggtgggaggatcacttgagcctgggaggtagaggttgcagtaagtcaagatcatgccactgcactccagcctgggcagcagagttagaccctgtcttggaaaaaaaaaaaattcctaccttataaaatttccatgctaaaaaaaaataatccatgctttttcattgaaacagaaattttcaactttccagtcctttgattggtaacaaaggaatgctccctatggcaaataattaaatctgcattttctctttcagcctcatccatcttgtttattgttttcctatagctcaaactatgatctcattttggccagaaatataggttcagtgacagaaaacaggcttggacattgcatagctgtggatatatacacgattatgtggatgttacagaacctaaaggaagatctaaatggcattataagaagctgcttttaccccaagacttattatctttctccatctcacttatagtttagcatctttgcatttgtagttccaaaaatctgaattacttcccctcgccttcttgtgaattaattccatatacttgtgaccatgggagagaagcagactcaaagtataccaaaattggagtccagccttggggaatgaaagagtgaacctttgttcagggagaaagaaggggccctgatttatgtgtgcagtcactcagtaagaaaagctaaaatgtgtatgggctacatccctctccactatcccactgtgagagatccatgaaggaatagggagggattgttggtcttccatggtacttctcctggaggatagcatatgttattcccacctgacttcattaaaggtaaaggtctcaggaatcttgaatgacaatcacagagatgcccccattccaccattcaccttggatttttggccaggttggcttcctgggggaagagggttacaatttgtctactaatatatggacacattggtaaactgaatttaaatcctcctcaatggacttgatgccacatgggacttgtatggggcattgctctcacagttctcattcaagagctgctttgtttccagatagttctacagctcttcaatagaacctggaatccatggtctgtgaggagaaacagtgacccaggttgtgtcagatgtttttatacgtaccatgaatggcttctgacatcacaaaggtttggaaaatgcattaaattcggtttacctcttaggcattaacaagatacattagcatgagggctttgagattctagaataatttctcagcattttccaaacagactcagtcaaggaaccctttgtcagagtaggcctattccccagaatatacattggaaaagctggtctggaggcctgtattagtttgttctcacactgctataaagatactacctgagtctgggtaatttataaagaaaggaggtttaattgactcacagttccacatggctgaggaggcctgaggaaacttacaatcacggtggaaggcaaaggagaagcgacacacaacttacatggcagggagagagagcaaagggggaactgccaaaaacttttaaatccatcaactcttacgagaactcactcactatcatgagaacagcatggaggaaactgcccccatgatccagtcacctcccaccgggtccctccttcaacatgtggggattacaattcaagatgcgatttgggtggggacacagagccaaaccatatcaaggactaaccacttatttttttttcttgtaggcttgcatatgtacctatacatggggtgagcatcctctcacttagggcaaaatttttagtgaggaattctatgacagtgctacatatattgtatatatgatatccctgttcccaaatgtaaacatctccacatgtatcccttctagaccaaaacctttttatctggcttcatggaaagctgtagtgttttgggctagtatttaccattagatctaaaaacggtgcatccttggattccttttgttgaattttgtgtaaatatttagggtatttacaccttgacaaccaatgactttaaagtttaaaaactgatatttaactgacttttatacttactaatatcacattatagatgctaaagaatcattgtaaccattagacaccaacgatttctttcagagtttgttaaaatcacgttgccttttttactatttttaaatagtatgatatctaatctgttcattgcttgtgtgtaagtttcctaaactttgccatacctccatataacttgtactattatgtacccagtatgtgtgacagggttccctgatggcaatctccaaagaaatacaatttgggcataaagtaatggtgcctaaattctgcccagaaatgttctgaaatgggggatagggttgaggtgacatgtagttccctctccagaagcaggggagtggaggcaggctcctgtgtcctccagtatgtttcccatccagtatccctggatcaggtgaatgaaaagggcattaactaatggggatattacaggatgaggtcaaatgatccatgtagagttcataccagagtacctgccatataggaaatatccaagtaattctattgttgtcatggttttattgtcttcaaatatctttattttcttttatggatttttacatactacctttttttagacagagcaggatttacttttttttagacaaagcaggatatatatttctaaacatttgaagatatttgaaggtatttgtcatcatcacttagtatcccaggtatcccaaccattccatcttaatagtatctgagtcattcatagtatatcctagactgtttcaggatcaccagttccaaatattggagtaagttattaaacaagtcttttaagatcttatgaagatcttaaaatagaccaggaagagaagtatacttgcccatatttcctccatttagttaatcccatctaaacttgctgcacataaattggaagaattaaataaatgagttgtgaaaatggtgtttttaccatcaaattagatatggatcatctggctataatgggcctggggcacaatctatgcatattcatttgaaaaccaactgggatgtttaaaaaagtgagcaggtcaataagaatacaatgatttctgtagactggtaatgcatggccaggcattaaaagtggatattgtatgcatctgtgtgtgtgtcttggaaaagtcaagtagaacttgatttgggtaaaacccaaatgtttctgtgttctttctagtcagttagttattttgtttagttagaacatagtaccactgaggtaaaggttacgtattttattcttgtgagagctgctttgctatgtatcagggcaaaaaaagaatgatggaacatctctactttttataaaaattagatcaacaatcactgtaatggtagaaaaagagagtatatgtgttttgatattggagcggtttttacaaaaatcatatatgtcaattttacacaggatcactcactgcttttctgctctgaaggatgaagatcacaactttccctaccattcccctacctctcaatttttgttagttacattgttatcattatattgttaatgacaattgcattctcctctataacaatgctttccatagttgtttagtgttggctccatatttaagtgaactcagagctcagtggaagttctttggatgatagctctccactcctgaattcttactccagccctaactggctgggctttcttctatctttttcaaaaagggctcatgaggcctgaatttcttaagttccatgcttgttgtatttgaatgatattttagttgggtataatagttttaggctatatatgatttacatatatatagaaatatttcttcattgtttccttgtattgaatgtgattctggataagtatgaggtcagactgacttttcttccttgtaggagattcttttttcttccatctggttgtctagagatttttttcccctgaattttagtaacttaattaagatttatttgattgttcttcattctttgtatcatttttttaacttgctaaactcttttgaactatatttttttcttcattttggggacttttttaagtatatgtttgaatatattttctgtcacattaattgtacacatacaaatattactgtctttatttcctatgagtcttaaattatctaattattttattttatttttcatatgcattcactgtgattatgtcaaactgttgctctgtcagtaatttgatttttagtgtgacccctctgctctttgatctttccaaattgctttttacttctgaaccatattgctttggtctttgtttctttaggtcttctttttaaatccattaaattgtgtgtgtgttggttttttgtttcatcctatttgtagttggctgaggttcttgatgaaaaaattttgcagtagatttggtgagtttttgcacagtatttctttaaatacttttccttcacaacctcttcctcttctctttatattaacaccatatacatatatgttagatcttttcatattgttccacaggtccttgaggctgtattcattatcattgttttcctgttttccaggttggataatttatttttatgtatcttcaagttcactaaatctctcctccgttatcttcattctgttattgagacaatctagtgaatctatctatctatctatctatctatctatctatctatctatctatctctttctttctctctttctttctctctctttctttctttcttttgttaattcttttgttcattctgtctttctttcgttctgtatttctgtttttgctgttgttgttgagaatgggtctcctgttcacccaggctggagtgcagtgatgcaatcgcggctaactgtagccttgaactcttgggcttaaagatcctcctgccttggcctccctagtagctgggtctacaagcatgtgccactatgtccagctaatttttttttttcttttttgcagtgatggggtcttgctctgttgtccagactggtctcaagcccctgggctcaagtgatcctcccaccttggcctctcaaagtgtcaggattacaaacatgagccactgcacctggcctctagtgaattttttgtttcacatgctgcatttttcagatctaaaatttctaagttttttatagcttttgtatctttcctgagagcttctacttttctactaatttaaagcaagctcaactttatctcatggactatgcagctataataggtgctttgatgtgtttatttgctaattccaacatctgagccatatatgtggattattttttttacacaaatgtgactaatacttatttgtatatttagtaatttttggcttgtatcctgggcattttgaacattatgttgcttcaatattggatatattacaactctgtgaagaatattaatatttacttttttgttttatgaagaattagcctcatttctttcagactatgggttctgtcttgcctttcgtgggttccaatcttggtccagttttcaaagcctttgacatcctcctcttgatctgtctgtgcctgtacactcaagagttagtatgaaacctggatggtggtttacgatcctcattccgttctcagagcccttgctaatctgctttggatatgtcccgcacatccaaatgcacagctcagagatgagctgggaacttgtgtagtttcatatacagaattagagtatccccttctccagctctctcactctgggattccctccacaccttccagtccttaagggctgtttttcacagctcttcagcccagaaatttgaaatagaaatagaaagtggagtttgagatttccatggtactgctgtatcagacgactctgtgattggggcctgcatttggggaaaagccacattaaaaaagaacaataaacccagaaattcacctcttggtgggtagcttctccataagccactggcttttgttttacttttccccatcctcagtatccttgtattttgtgcagtgtttagttgtaatcagtggaagagataggaggtagtgggcttaccctctcatgcaagaggcaggctcacattcaattaaactgcattcagctgagcccctcttttattaaagtcttgttcttactaagttgttttatagcataaagctatttggatttttttttctgctgttcctttagttgttgggtcctttttgtgtcttttgcatgatgtgcttctgtcctccttttcctggttttgttgttagtctgaattttttgctgtgctgtttgttttctctctgatcatgtttgagtaactctgaaatatacagtgtgaatggcttcttaattatcttcccacctctcataatatgagcttcttttaccctcaaagttgcagtttgagaagtaagtatttcatgttttgtccatgttctgtagcttcagaaaatggggtagggaggagaatagttcaactgagaagggatgtgatctttattggaatagccagacttaattctctcatctgacattctgttaaaccttcattagggtttacttttgggctttggatgatttctctaattcactgggtcatcatggaattttcatgcccattagagggtgtacccagttgttagttttctgtgtttcatttgcttttcccagtggttacttaatccattactcagtcagaagaaggagaagagaagaatgcctagataaagtttgcttctttctagatttggatgcattaatgagaatttttcggattttgcagattccctgtataatttctggcactgtctgggatgagctgtactatacctccagttaaccctagagtcttctggctccttcattgaattccagtttctaaatctgtgctcatgtgtttacccaactcaaagtagatagcttttctcaaatcaggaaaatgtatccctgaaaagtgaagtgttcctcggcaggtttggtcattactgaatcttccgtaagaaattctttaaaaatataatgagataatgactgtgaaagtgctttataaactataaagtgctcaacgcatgtaaaactgtgatattatcatcactcatgtcccctatgctgctaatcgtcagtggatcagccagggaggcaggcgttcctcgcttctgctttgttatactgtcttatcccgaccttgacactctggcagcagtgaccctcaacaagataacctgacagtcagcggtgtctcacccacactattacctgcctttgttagtagcactcagacagcatataggtaattccccatgtttcttgttcattgtctctgtaataaaacattttcttttatagaaatcctgactctaatttcacaaaagctctgctatggaacctcctctggcctctcccttcctcctgaaatacagtagtgtgtgtttcatatttgaactcacaagctaattgaactttattgaaagattcttttactttgcccaacatctttaaatagtgatttggtgctatgattagatacactctcaaaaactattgttgctgggtagagagaagcttcaaggaagaatgaaataaacaagcatgatggagttggatgggttagaacaagtttgtttttcttatgtggatatgcttttcatatccacatttattttgtttccttgtctgaactgcaaggtccttggggataggaataatgactgactcagactgttctggaaaaatggagtatgatggaggacatgagcaatacctataatattataaatgagagaaataaaatgataaggaattgctgaccaaatacagtaacactaaattgcagtgattaagagcatgaacttagagtttgaccaattatagctgtatgaccttggacaagttacttaacctttctaggtcacatctgtgatttggagataataagaatatttgcctcctaaggctgttgataacgaatgtaaagtgtttatagcagtgcctggaacataatacaggcaaaaatgttatctgttatcatcatcatcatcattattcttttatgaattcttccttgaagcttcacaaggcaagtacaggacaaatgaaaagaaataaagtttacacagcatgggataagaatatgagatttactatgccaaaagtggtatagacgggctaaggattaaaaactaataacaaatgcttctttttttttttttttttttttttgagatggagtttcgctcttgttgcccaggctggagtgcaatggcacgatcttggctcactgcaaccgctgcctcccgggttcaagcgattctcctgcctcagcctcctgagtagctgggattacaggtgcccaccaccatacccagctaattttttgtatttttagtagagacagggtttcaccatgttggccagtctggtcttgaactcctgatctcagaataaatgcttcttataggcattgttttaaaatgttacatgtgttgtctaatgtaatactcatgacactatgaggtagtcccattttatagacaaggagactgaggcactgagaagtgaagtaaccagcctaaattcccataactcataaagggttgagctaagatttgaatccaatcaacctctgcatttaatgcctatttgtgagtgagtgtgtgtggcagaaaggatccagagtagatgactggtgaaattagatgtttaggcaatgtcttcacatttaagatcattgtcaaggagaaaattttgaaatgtattttgtcatcagaaataatccagggacacgtagagccaaggcctgagccagagaagaggtatttatactttgattcaaggaacatgaaattaaccaggaaaaactgaaaagcaatttaatccttagactttataggagtaaccttgttgggtttggtggatgtgatggaaagaatgaagggcaggtattgagcacagctaggtatgattctctttttgccatcttccattttagtgaccttgagcaagctggttcagcttggggtaggggattttgtatccacagtagcagagtgaagaattatatggaatcacttttttgcacccttcagattctaaaacacaaacgtttttgcattgtctaccctgatactgaaaattattgatacccttgatttaacatttatattctatcttattttgtattttgcacattgatcattcatttattcagcccctgtttgtttggggtatgctttgagctcactgtgtgacttttttccttaattaaaattagtctgggagagaatgtatttgcctcctggaattctcagaattctagcaaggtgccctaaacatcataagcacacatcagcactgttcatattgattatcatggtacagtagtgtatcaaatgccacctgaagttgagtgctgcaaatatgagaaaacctccgtaaaatcagccctcaataacttttctagggaatgtgccttaaaaaaaaaggtactggactgtgtgctgagaaaactgtaaatatgagtaaaatgatccctgccttcaggaagtttaccaacaagggcacaagcaaccattgtagaattgcttgtggccttattgatatacaggctaaggattaaaaaattataatcccagggatgaaaagctttagcagttatttagtccaactctccacacacattgagtccccgttacaacagcccaccaaatggttgtctggcatcttcttgaacacttcagtggctgtgaactcaaactgctcattctgctcgtggtagaatgacaggctctcaatttttgtgtagaaggaagtgtcttgctgaagagcaaaggtcttttctaggctgaggaaaagccaaggaggtcatcttggagataaaaatctggaaagtggaagtatatgggaacagacctcaaaggtcctttgttggagcaaagttacagaagtacaaaagccaaggcacgtggtaggaacattaagtagtctagcttggtcatttggcagtgacaggttgagaatagggaacagtgaaattgttaaagatagactgggactataatttggaggaccttgagtgccctctacttctggggtacataacggccctattgaaaaccctaattctatatccaataggtggctcattgagtaaatcactgttagcagtcagatctgatgtgttccccaaatccacatcctttatactcacctggacaactaccattcccccaacccccccatcatccatgaattttcttcagttcaaagagacatggttaaagcaggaattatgaaaagggccctctgccggccttatttccatgtagatctattttatatgcataataaccctaaggggaagctgtgtcaatctgccttacctgacagacccctaaatcctcccaatgctgcctccactattggacatgtgccaagtggcttgcaacctcaaagagagaaagcatcctgattttttgtgtgtaggaaggtggggggcagtgataaacaggtcttggcctgttattgtcttcctgcatgataatgaacccatcactagcacaggaatttaatgcaatgatttttccaagaaccatccagccccattgtagccctgcctgaaaatgtaaatacaccctttctggggacagatttgcattttttggtgaaagaaatgcatatatatggcaaagatgcctctgtaattatagaaagtttatttctgtccccagatgtcagcaatcaaattccacataaatatattttgtgtaaatctgtcggcagctggtctccattcaggtttctggagatattagcctgtctttgagtttatgacaaagttaaaaattattcattaaactgacctgcagtatattcagtaactggaaaattgccttgcagttctatttggtttgtagatgtgatcacaagtaaatttttaacttaattaattggccgtttctgttgacaagaaatttatgtggtaataatttgctcgaaatagatgccgactgtaggaaatgagatatccatcataggcttgtgttccaccagctgcacagtggctattatgaaagtatttcagcctgcgtcgaccccagtgtttgtgcagtcaagattatatatacccacgatccatagcctgccagagaggcgctggtggaggtctatgataacaaagactttgtgatttatggcttgctgtgaaagcagagcttgatgagattaaacaatttcatagcacaagtgtttctcaagacctgatttgtagttgcaagctgatggtaaatcacatttatatatctgcaagcgtgctcagcagaggactgcaattacagtttaagacagctactttttatttaatttttatcctggttttgtctcttttatatccccttcgtctgcaaaccattcaccttcacaagtcctttcctggttagaaggccaaagattgaagtcaatgatgttcttcgtgtctttgtgccagcttcagagggaggtccggcagatttcagagccgtgcagactggttcaaactggctctgactggtgtgagctctttgttcaatttcatgtccaaacagaagtctgtttgctattttcccttggtgtgttgctgatacttaaacttcttggtatacagagggagaaagaggggtcttcatcatcctgggatatagggaactgtggagcacataatggaaaagggagatgaggactaaattcactttagaacctcaacttcaaggttgcagcatatcttagggtgtacagttagctcccctttaatgggaaatgtgaaattgtgtttccccacagatctgggaggaataaactctgcaatgagtttatttaaccagtttattgattatctactgtggccacatgtcttcactgagtactagtacagcagtatttgccctcaggcagtttgtaatctacatatggtgctaaaacataaaaataagattggaagcagcaagatcagtgatagccttacacgagtggtgcacctgttgttggaggtcagaaggaaagggagatagagttcttcccactggggaagcatgaaggagcatgaatgagacaagtgcttgagggacagatcggatttcaagtaaggggaagaggaagttctggaaatttcagtgatctgtactgaaggaggcctctaaaatactcaggtgtgagttcaagtccaggctgggtggccagtgattgaataattataataataacataataataacatcgattgaatgcttactatatacaacaaagagtgctatataggtattatctcattaatcctcataacaaccccagaaagggagtattattgtgatctccatttggggaacaggaaattgaggttcagagaggttaagtaatttgatcatgttcatccaggtgtttggttgagctggttcaaccaataccctggtgtatttcaccccacagcctgtgttctttgccactgtgtttcactgcttttctttttctttttaaatggagaggaggtctcactctattgcccaggctgatcttgaactccttggttcaagtgatctgccagcctcagcctcccaaacagttgggactacaggcatgcaccaccaccacacctttcttgttttactgctgttagacagagaatatgaatgtaattagggaggcaattccactgttctgcatcctggtcacatcttcaagagctcaggtcatttctttttccacgaaagtacctaaagtttgggatgttatttttggtctttgtgataggctgaataacaatcatccgaatatgtccatgtcctaattcttagaaactgggattaccttatatggcaaaagggactttgcaggtgtgattaaaaaatcataaattgtggaggttattctgcattatccaggtgggcctgaggtaagcacaacggttccgaagaggactcagggaagtcagagtcaggggagaaggagatgtgatgaagcaagcagagattggagcaatgtgcttttgaaaatggagccaggggtgcaagacagggaacacaggcagccactaggagctgggaaaggcaaggaaacgtgttctcccctcacctcaattttgcctctatagggcctttttcagacatctgacctccagaactctaagacaatgaacttgtgttgtttgaagctgctaagttcatgtgaacttgttacagcagcactgggaaactgattctgtcttgcaaattccaaccagcttgacagagagtttaaccctgattttgaaatcttgggttttttttgtattatttgtttaagatagggactgatatggtttgactgtgtcccacccaaatctcatcttgaattgtggctcccataatccccaggtgttgtggtagggacccagcgggaggtaattgaatcttgagggtggatttttcccatattgttctcatgatagtgaataactctcatgagatctgctggttttataaagggcagttcccctgcacatgctttcttgcctgccaccatgtaagacatgcctttgctcctccttcaccttccaccatgattgtgaggcctccccatccatgtggaaatgtgagtccatcaaacctctttttctttataaattacccagtctcaagtatgtctttgttagcagtatgagaatagataatacagggatgctttttgatttccatgtttccccattctcccctcttttgtagccataagggaagtgatcatgtctgtttcattcactcatgaatctctgatgcctagtatggtatatggtatgcagtaggcactcattaaatatttgttaaatgagtcaaggagattacttcatcctatttccaggatatagttggccaatctgtctggaattcagttttttccacaactcaaccagcaaatgtcatagcttgctctttatgaagtcacaaagggagtagtcaggcactctacttacagttgtctgcaaacttggatatctcagtggagggagggggcagtaaggccttaggaaagccgaggctggctgaagaatctctaataagtcaatgtgagtggctaattgtgctaaatattaaaaaaaaaaaaatagatgtaaccctttatcctgatagcaggaaggtaggagggtttaataaaaagcatattgtctctgagaccctcacatgttttcatgcccgcattggctttttgtcttttatgtgataggtaggtagggagtgttttctacctatgtattattccaggttttatgcccctgagggtcttttagctggagacttataggcatagtccactccactgagtacagatgttaaagttgccaatgaagctctttatgagggatggagacaggccagtatctttggcctggattctagagacctggtttgaaaatcctgggaaagctgagagcttcgtttctccctctagagtactagtgtattagcctcccaataaaagttaattgaatttaattttatgttttaagtgtgatgcattttaaagttctccccagtgctagagtccctcttgaaaaggcagtaaattcatattattaaactaccaaatgtaattcagctcaaataagcatattcggcaatctttattctggatatgtgggactgaccttgcgttgaggctaaatcatttcatcccagacaaagtctgtttggagttaattggggaagcagtgtgggtgtacagcaggtcactctgggctttttattctctttctggccctcattcaaagagtcgctgtagcatacattttctgatgccagttcttccattattttataaatatcaatatttgacacagtatggaaggtgaaaaagacaatgaagatcttcccgctggagattcttcattagatgccctactttaccatattttaaaatgggcagtttgtcaccgatgcattaaagggctgtaaggagtggagaaagcacattgggctggaaatcagatgacctggattctaacccctgcctgtccattaaccaacccggtgaccccgggcttttctagtcttggggccttcattgttccacatttttaaagtgagagggttgtgaaagaacagtggttttcaaactgcatttcaagaggtacgaatattttgtcactgtatcttagcagctctgctgagtgaccagagaggggatggggtgagcagcagttaaggatgagaccagctgatgggcttcaggctctcagactcccacccctttgtgcagagtagctcacttcaatagcaaaaatcaacccaccatggcctaggaaagcttcaaagattctgccaaacactttaggtgtctaagatatttggggcaatttctccctaaagtttgtcaaggcagatgttggatcaagcacaatgaattgagtcatccattcttttgggagtagaaataacttaaaggatttgtttattcagatttgctgatttgtccagagttttaatgtttttccaaatttgtttctccaaatcctagctttgccagcccataatgtcatagcagctctgcgcatcttgacatgggggatctatagtggtaaaagcaggctggcatcctcttctcaaatgtctagcactctctttactattattttatgtacctcaaactttattattatgtcctctattattaatggcagagacaatgatataattatttatgctggaactcatgcttttgaatttattggatagagatcttctgaaactagaagatataacatatactaaatgtcccctcttatccctaagggatttcttttatctgaaacctcctgtttcacttatctctacattttggtggtgaatctggttgtggcttcttctttatttgccatctgcctgccccactctcagcatacaggtggctgtggactatctttattcatgtaatcttagttttgtttctatctaaacatcccatttgtcaagggccagaccagatttcatccttataggaattcctgcccagccactctagattccacaaagatcctgttctgaattccttcagaacctaattgggaccaaaaatgctcctactgtataacacagtgtcttatactattcattattggtttatttttcttaatctaacttgactctaagcaatttgaggacagagatcctgcaattctttggtatcttctgtagtggtagatatttaacataataacaaaagtatttattataataaaataatatttatgccagcctgctcctgttaggaaaggcaatgcattcttagtgagtggaaataaggtgtgttttgtttggtccactttttaacattgtattcataaacactctctggcaacaccatcattaattcatttccaagaggaaaaaaagttcttgctaaaaataaaattctgttccataaactctgtaaaaagaccagcaaacaaacaagtctcctctggaggaaccacagccacaccaggcccttcagatctaataagaaccttaattccatttgaatatctttgttgtgctgcactacgtggtttgggattcattttgcattagagaaatgacaaagacccagaaaacaagcactgagtcaggactggtttcaaagagctcagcttcttcgtttaatttccagttcatttatttgagtactgtcaaaaaccaaaatttcaacatatttaggttaacaatataatggccttttattagtgattcatgaactaggcagcatcttaatctaaaaatagaagtgctttgttggaaatggaaaaaagtcagtttttgaaaaataacagatgctgatgaggttgtggaggaaagggaatgcttatacactgcttgtaaattagttcagccattgttgaaagcagttcggcaatttctgaaaaaacttaaaacagaattaccatttgacccaacaatcccattattgggtatatacctaaaggaatataaatcattctactataaaagacacatgcacgtgtgtgttcatctcagcacatttcataatagcaaagatatggaatggaacctaaatgcccatcaacagtagactggataaagaaaatgtggcacatacccactatggaatactatgcagccacaggcatgggcaaagatttcatggtgaagacgccaaaagcaattgaaacaaaagcaaaaattgacaaatgggatataattaaactaaagagcttcttcacagcaaaagaaactatcatcagagtgactccattttggtttggtctgttctgttggggcctagtgcaggagctcagtctaaaagcatggcttcccataaattttatttaacagtagaattcttcagtactactacaattctttttaaatgctatgaccagatttgcacctccaaccccaaacccctcaatgttagttactacaatataaggagaaactgtggtttccgtaggagaaaggaagagattcttggaaaattgcttgggatgtacaaagccagagccaatcagtcaatcagaaaacatgatggagggccagccccttgcaaatcaaatgaagccttgctctctgcccatgatgataaagattatgttacaagaacagtttcctccaataaagtagtagttatggaaacaaacaaacataaaagatatttaatatgttcattccacaagggtttattcaataatttaatgaatgaataatttattaatggtttgcccaaaccaagggcaaggacatattacagtggaaggtggaggtgggatgttggatttgcataagattagagaacattgatggtatctttctctaggaaggacaaacttggcctgtgtggtgctgaagcagatatttccagagccttcctcaatgagggggaaattcggagaaaagaaacaaaaagtggacttggactttactgaattgtttcccattcccaagtttttaatatgtacagacagaaaaatagacagtctctttttgacaccctaagttgtacctgccaaatcatcagagtggcagaattggcctctgagaatgtgaggtcgccttcttttatgactatttccaatgttatttttttcaacatctcctccttagtgtttgtaatgcagagaacacttaaagtgctccacagacatggagcatttccattaccctatgcagtattacaggaagtagtttataaggagttcaatattaggaagagttatctaataaaacgcattgtctaatctccctattacaggcgatatttggatagatcctggttaactatagtctggcattttcaggaatacatttatgtgtacggtgaggcattgggcttggtgtcttccaattccatacatgtagcaaaaacctggtggctgtttctcaaatgtgcctcataactgaccaggcaaaatggatcagtaattgtcctgatgaattgccctttaattaccctctttcaaaccaatccttttcgagcatctgatggtgccaggttattgacttcatgtctttaggtttggacactttttgggcaggattattccgaagaaccacgatcatctagaggaaaacagaggaagtttcactgttgattctgagagaagaattttgagggggagcatttacatcaggttctccaatgcctgcaaggcttctgcatttctagtcccaacaaattcttcaaaatttttaggacaagattaaattgtaaccactattaactgtgtgcctaggtccatattcatgcatacctatccctgcctactttggcagaatgagttaccagtgtatgtagcagaataaaacagacttttagggtatcctaaatactcccaaactttattgttacaatctctttaatgggccttatccttcaggtgagtcagctggtttaaagagttatgtaaggtacattagcccttaaacatatttcccaaaatgctcaattctgaaaggaatttatttccttgttaagactgagttgaaaagcatgggtctgcagcaagactgaattatttatattagtgatttcttatgacaatcttataagtaactgtacaatttaggtttattttctctttttttttttttttttttttttttgagacagagtctcactctgttgcccaggctggctggcgtgcagtggtgcgatttcagctcattgtaacctctgcctcctgggttcaggggattcttgtgcctcagcctccccagtagctgggattacaggcgtatgccaccacagctggctaattttatatttttagtagagacaggatttcaccatgttggccaggctggtctcgaactcttaaccttaggtgatccaccagcctcagccttccaaagtgctgggattacaggcctgagccactgccctcagactctgtcctctattccaatggtggtggttaggtggacatttctagagaaacctgtcttacttcttataaggaggtgctataccttcaaggtggagacataccttgcttatttagtatataatgaagagatgagagaccagttgactctgagaagtagtatgggtatgtgtgatgtgaaaaagagtcatgaactactttgctagtttcagatgtaaattaatgttgacctctaattaaaatctttcaatttatatataatagctcaaagaagagcgagtaccatgacactttagatgatggtttcaaaatgacgggttttgggagcacttttctttggtacttcagcctgatcctccaaaaaggaaacaaggatttatttttgctcaaggagcggtcaatgagtgttactgcaaaatgaatctgaagtttttctctgtcttaggagggatgcaacattcacaatttctacttgtctgtctgctgtcttcaccctccctcctccctgtctttcactgttgggtctcaaaataaataacacagacacttcatctttaacttcagataatcagagtcacaatcatctgggatattgtgatgaacaatgtacatttcatacacatgatgtcataataatttaaaatgtcatctcaatctatttatgatcttctaatgactgaaatgttttacaattgtgggggatattttataactgaagttttaatggctgaatcactaacacctggctgtctggaatgcttttctttctcctagttaggcatttaaatgcatttctggaaggcccaaggggtgggatgtgacatataagctcttaaaaggaggaaaattagttcttgataccttaatgatcagtcaggtgaacgtttgcatacttagcattaatgctcttaagtggaatagcttgattaagacccttggtaggattttttttttctttaaacatccttctatgtgagattacagagggaaatgctgctattatgcccatcccttaaaaaagatcttagatttttcttaagtgttttattttctaactctattgttttcactactttttagttttctatctttggtttctaagacaatcaagttacctctttattgagaatttagtgtatattttcattttgctgggctaatatgtatatacagattatatatacacccacacgtgcacacacacacacacacgtgcacacacacacacacacacacaaattcttgtccctggatgagcatacagttgcttaaagaagaccagacatatacacatgaaaatgtcagtgaaccatacaagtcaatgtataattaagcccatagcaggcccccggtggatgtttactaatgatgatagtggcactaaattatctggtgcaggccaagagaggtcagtacaaggttgcccagaggcctgcattaaacaatcactgagataaagatgcattttagttcctcctatctgtacaacatatattaatatatagccttccaatgcaacatcccacttaatttccatagtaatccactgaaggaattcgaggtgtatatccacagtttggcagaagggaaaataaaggcttagagccatcagatcacttgcacaaccaagctcacagagctgggtggtgacggagcagagcctggactccacatccttgggaccctagtctgcttttttaccccaccatgttgcttccagttcacagggtttctagcagagtctctttaggctaaattgttgccttgaatgggcaatttgcttgaaatgtagctggatgtgcagcatctttgctcatgttgtagccaggaatataatggcaaatctctgtatatttgtttccaatgaagattgactacactgatgaaataatgataggctttacttccatttttatcaactaatggtgtttctggtgacaagtccccatgatactactttatgactctttatgcacacgcttgtgtcgctcctgcattctagatagattgggctgatgttacacaggcctgctttgactgacaccagaaagccgtgtgacaattggcttgtagattggacagttaatatagagaagtgtcatactatcccaattgggcattaagatgccatagacatggctaaacagggtggctccatctgtgaacaaaaggccactctgaaatgtcagaaaccaaataactaggactgctgtgcttgcaaatttgcaaaatggggaaacagtgtgtgtatttaattatttatttatttatgatggattcttgctctgtcacccagtctgtaatgcagcagcacaatctcggctcggctcactgcaagctccacctcccgcctcccaggttcatgcaattctcttgcctcagcttcccaagtagctgggactacaggcatgtgccaccacacctggctaatttttgtgtttttagtaaagtcattgttttgccatgttggccaagctgtttttaaactcctggcctcaagtgatctgcccacctcggcctcccaaagtgctggaattacaggtctgacccaccatgcccagcctagtctgtgtgccttaatcattgtatatctttaggcaaatatgttatctctttagccccatgtctgtaaaacgagagggtaatgtttgccttatgatgctcatgtgttgattagactacccaaaatggtaattttgttgaaacatttagaaaaatgtgaagaagagtgatacaaatgatgtctcatgtttgcattgatgtcatttcagatttttgcttctaagtatcttcctagtggcatcatacaggtgatttggcctaggttggtagccatagtttagcttttacaaaagactaagagttcccataaacatgtggtttggttctttaagttcaagccttagggagataactatgaggagttaggggtctttgtaattagtcaaattaatgagccaaaggccacatgtggcagagttatctatgatttctgtaaacattataaaattctcatgttaccttatctcttatatataggattccagctgggctatgaaaaatggctcaaaccaccatctattcctcccatttatctctgagaaataactcaagacccttaaatctgtttactctctggtttgttgtaacattgtaatatttagcttcatgtcactcagtcataattaaacagttcacattcatattctccattattggatttagtagccattctttagccacagtgtgcacttggaggttgttttggtgcttgtttttaataatgctttcttgaacttctacagtaaatacactttcccactccactggataggagaggagttgacaagctgggtgttctgatattggctgtgctgatgtttgctcataaattcatccagcaatctcttgcggaaaatacgttctaaacttggtattaagtttttgggcctatgaccagagtgaactcattttgtgtgtgtgtgtttgtgttaatccttccaagagcaataggttcacttggatagttcttagtttctctttttaaatttcttgattaagctgagagagttcacactggaaactctttgctttgctgattgctccagacctaatacaagtagatcttcaggggaaaagcaacatggctcatctaagtatttacctttatactggtgaagtcatctcttggtgtctatcttcatatttcccaaagaacgtataaaacacatcttatttcctttcctaagtctgaggccttatccatatattttaacttcagacttgaatttgtccttgtccctgacctagtaaacatttttatcaagaacatgtaaggagctggaaaaaggccttttttattaactttcaaagtataaagttggagaggtcagaacattccacaggttttagatcatggttccaagtggtcccagcaagctaaaacactgcctgacacctatcagacaaaatttaataggattgtaagttagaagtcctagctttatattttcaaaaatctattattgaagtatgtgcttgaaaggtctggcttggcagtgtttcaaatcaaaggcattgggatattttatttgactgaggtttgatatataccagcgtagactatagcttgggaaggtattgccaacttggatgtgatggaggctttgggtcacattgtcttcttgggattcatacagttcacccatcatctagaggactaggttcaggtcagaggttcatgttttaggaaaaccagaaaaactaatggggatcttcaggagaggcactaggctgttgagtgttacggaaatatttggcatagaatagaggagattaagatggtacatagaacattatctcaaatagttgaaacattattgtggggatgaggatgtagcatttgtaaaggagaaacctaggactatggtttaatggtataaggagggaagttttggcacaatgtaagaagaaagttttattaaaggatcttattaaacaaaatgatattcttccttacaaagatgtgggtgctgattgttctggaagagctaagagcagagctggaagaccatttttgtaaggcattgtagaagagatgtctacgtctgtgtgggaagctggacaggtcaaccttgcaggatgcaaggactcatttgaattcaaattcattgttatactgagaatttcaaagtttgcctatacattttcagtcatttccttgtttgtattcaggttattatatagcattctcagttagaaatatcacatggtcactaaacctggataccaggcacagtttgagtttctaaaagttgaatgagctttcatggacactgctgccgccacctctttgggtgtgccctctgctttgcttttgtggtagtgtcacggacatgcactggctgattctagctctcctctctggtaacccttataaccaataagtgctaaaaggactatagtatccctattgcctttcactgccctctaactcttgcttaagctatctctgccccacctcctctagccctcttcagttccactttcagattctcccttgacccttcattttctccttgcaatggaaatcctaccattttttccaaggctcagctcaattccatttccttcctaaagtcacctctttgctaatcttcactcatgctaatcttcactcatccctttctttgggactgatacatctttggaattatctagcatagtgcttaattgttttcacattttcctgtctcttaattttatctcccaatctccatagtacgtaatttgggattagggactttgccttactgagtactgcatgaatacattttattgatttactgatttgattacaaatatgatcaccacacagaaccaactggctgaaaagaattgtgccctgactttggcttcatcagcacaaggtcaaaactaaccaatttatttaagtatctaaaggatagggcatcatgtgaattatattaactatcaaataagcctagtttgcttattatttagacattcttctaaaccctaataaccccttgtcatctctgttatgaggccaaggttgcacgtttagaataggtttctggaaggctaagctgcagagccataggcagatgtgctgccactcctgcaggcttattcacgaggtggagaaaaattctcttccaagtccctggcttcccattgcaaagtaaaatgatctctggtttagagctactcaaagggttaactttgactccttcaccaaacccaactatttaatgtttttaacggcataatgtgttaatagccatacagctgttgtttctcagcctcttcctttattgagttagacaccatttagtaggctgagttcaaattgtaaacaaattatttttgcatatggatcaatggaaatttaataaagtttattaaaacagtatattggaccaaggagtgctgttttctctcatggatataaaccaacctcattagaccaacccatagtaacagaattgcagggaagaaagtatttctggtcatttaaagattattttggttcaacagatggtgactagcatcagagtatagtttttcttgtttgttaattcatttgcatgaacatatttgatggatacctagtgatcccaacatgcttgattttagtgcctagtgtgctttctagcacatagcaggaagttgatagagttgtcacagaggggattgtgatctcaagtgcaaagaagtggcgtgagatgctgagagtcacacagctgttgatgggcagagccatggaagagcctggagctctgagctctcagtccagtgctcctatcactcacacaatggccctcccttgattcactgcctgtgaaatgtcttaaatgatccgcagataccttctgcctgttctcatggcaatcccagtttatgttgcaataaatgttatcttaatctcaattgattgatgagttcttaaaataacagcattaccaaagttcccactcacattgtaaatcgcaaatattccactctttggaaagcattcagggtggctaaccactatttcagatatggcttgggcagccccactcttgtaagaggtatctgaaggggcttttaccagaaggagctaaatggttatcagataacttagagtgggatacagggaatttgtagtaaaggcctagattccgcaacacaaatactgactgccctgtggatttgaagttaaagcagaagagaactaagatgggcctacttttttggccctgagtgacagcagttggcagaagcaaccctttggggtagtagaacaagcttggagttgttcattccagcttccttgtgtcagagtcactgttaagtaggaggtcgttctgttcgactctggttggaatcattctgtgtctgggggcctgtcgtttctgtcattcttcctggaaagtagaatcctaaatatgggcagctggtttggactgaaaccttggtgacttctgaaagttataacaaatggaagtcattatcaccattgcccccctttacctttgtgctacttgaggcagaaaatgatttccccctcccccggtttgttttggagtctttcatccagagagaaaaggattagcctatggctacaatagagctttcagggccttttggcgtgctgcaaatgtttacttatccaggtacaaataggtaaaagcacatagttaaagcttccagctgcaaggtcatttacctttttaaaatgcagccgcatgtgccgactgaagtcgagggcttgctggtatgagccattaactgcctgttgtacgtaacctctccttgtcttacacacagctgcgtgcgagctgctggtgccatgcagccagcccaccatgcatgccttgcgagcaacaaaagcagtttaacttgtgatcactgatcatatgatccacttacagggtgcaggctcagtcaagtagaactggtaaatcattaaaaatgcgccttgatgctatgcctgctgagtaaaacatcatgctaacatctctgcctcccacccccaaccagttagcagcatagggaaggagctggtaccagctgcatattggagaaatccagttggctgagctggacgtggtgagagattgtcagctgcttccaagcagcattggagaggaaggcaggaagacagaaataatctggagtggctgccatcctctctccttgtcctttacttactcattaactgagcctgtgcaaagggccttctgtgtcaggcctggtactagtgcctaaattacaaaggtaggagaggaaatgaactctgacttagagactctcaaagtctgtcaagaactcagtcaccaccaagtactttcacataggcacccatgacgtgccgtgcaaccctaagaggcctggggtagccaaagagatgatgcttaagctgaaccttgaagagtgaatagaatttcatcaaggaagcatgtagttaaaggaacaacatgggctgtgccttaaaaagttactttctagaattctttcttccatgaagcataccattctactcagtttcttataggttttaacaaattgttttgtgactgtatgatggaaggtccaatggatcctctcttctctccatcatgtgggtctaattgtttctggcatcatgttactcagctatataaacccttctgggatgggactgtatctcttcagtattcttgattttccttacagctccaaaaacttggggagtgggtattgttggttggccaccttcttccattttcttgattagaaatattttctttgacttattttccttagaaaataagaaattattaaattagaaattagttgctttcacttttaactaaggcaatgagacagaacataccagatagatgttcctcctgcatatacgtcaggaacatctgctgttagagaagagccgtgtgtgtgtgtgtgtgtgtgtgtgtgtgtgtgcatgcacgcacgcgcaatatgttttaagtatattgtgtgtgtccatatgttctgggatattgaggtttctcaggagtcctgcagtttgcatggctgatacaacctttaaaaatgacttggacttccagaggctctggagagtaggtttaataaaatgttcattcctttagatgtgagactatgccattttactttatctagatacaccactgtcttccagttaatcatagcccttaaataccttcttttgcttctcaaaaggttttacctggacccagaagttcatacagaagctaaactttgggaagaggtcagatgtggaatccgtgctcccttccctttttatacttgctctgctctgcttgtacaatgaatggtcagttagaatgcctttgaaccaccccccttcctttctttttttttttttttatgggactcattcctgcaaggacagttgtttcctgcagaataactttctcattcctctcaggactactgcctgggggccaaaacttgctaattagagggttggaggaatcttcgcaatctgctgtcttcattttcaacaccagtaagagctaacctttggctggttgtaggaatgaatgagttttgtcctctagaaagatgtccgtcttcattgtacaaagaaatggaggcctgagactcaagctttgtaggattaagattcagataaaatcggacaatttgctcagctttctgctttacatctttgtaaaggaaataatacttcctcatacctcccctaacttcaacccaatctctaaagaaatgagagaaactctaaatctgttctaaaactaggggtagtcatggcataataggtatgaaagatctgttcttatctcttccttgtataggggcagatatatagtggcagaattgagaataaaccaaacaattgagtgttttcagtagaaactgatatatgactaaccatgtacctatgaacatatttgattggtggtatttaaagagttgtaaatatttctcattaaaaatagactgtgagatctgtagtcatcaaaggtgggattgccacttgtggaggtagaactttgttttatttgaaatcaagaaaagttgtgcagctacatttggggacactctgggttgttggcacaaaatttaaactcaggctatcaggaaattcctcagtgggaaggcatttcacaaagtcgagatattatccattgatcatggtaggaaagcaggcaagaaagctgtgttctatcctgggcaagccatcaatgcctggggaaggccctttatttccgtctctgtgttctcatctgtctaatagagaagttaatacctttccaacatacttcacatgtgaaaatcagacagtgtaacaggttctctgtctttctctcctggaacagatgaaatctcttccatcattcagacgctaggctgttttgtttggactctcttctatgggcatttgccccaatccctttttctatggtagttattgacttatctcatttcctcctacaacagtgtaagttaccttaatttgcaacagtttactcctctcaacatggtgcaaagagcacagcacttgcatcaggaagccctaggaatatagaatcagaatggaattctgtgatggaatccaggcacttggtttccccaagaataccattgtaggattgttctatctgccccaccatcttgtttttgggagttaaacaggagggcttatgggaacatgccaagtacatagtacatgcttagtaaccattaggctccttcccttagttctttgctcatagtggcaacttaatatatgcttttggaccaatcaaattttgacaatgaggaggaaatccatgctatttgttttttttccttctggttaagatgttcaggagagaaatagccctgccctcagttatattaaaaatttaaaaaattaccatttcaattgttgatacaaagtatttttgaggtctgcagaagacacaatgcaaattttattaagttaccattatccttgtcagtgaaattagagcatgtttctaatcagtatcttcagcaattacagacaacaaggaaataactcatgctgttatatgaaacagcttataaatttttacatacatgtgagaggaatcacttggaatccaaagctgccaagaggaataattaggaaccacagaacagatcttggtaatgtgacagcagcttctaaaacatcccacaggacgaagaagcgcaagctggcttgacctatatctttaataatacagatcattgcccttggattgaggctaaagggtaggaccaagtgcttgcttcatcacgttttaggaaaaattgccaaagtatatttatgaattcaccacacaatggcctcttgctttgattatgaactgacggatctctctaagtagcaactcagcatgcaaaatttaaaacaaaaaaacccaccacagagcataatttcttatattctgtcatgcttggcaaaaagtattatgtaagacccaagtagacaaatggctgttaacagtagaaataaccttttgtttaattagaaaataggagctatatgggataataaaaatggttactgatgccctctgtcactgtttaataaatacgatcgcgctagagataatgggaagtgttatttatttgtgcaatatcacagacttggtaattgttcatgttgttgagcattttcctgtgtggagatcacagtagttttagaatttgtttcctttgatctaagaaaaggaaatagcaagttgtttgcttaaaatgttcatggcctccctaggctggagtaaagtatctgcatatttttagcccctcagttttgaggacagaatctctgtggcgttgtctgatgcatattgagaactggtgcgttattttgaactggctctattttttttttccagagcgccctcaggtgctcatggaacatacttctcagcaatgccatttcatgttcagttcagattttccagcacaactaaatttagtagccttgctggagggaggaagtggagcagagctacctacctgaggatgtgttcatgggaagagaaaaatctccctgttgctccatcttgagaaccagcatatgggatgaagatcagactgaatttccacagcatgtgtttcactatcttccctggggggtggtaaggagaaaaggctgaaggtgttggccatgtttcagggtcacttccattttgtgtttactgtgaacactttagttgtgagactgtgccatgtatttggggtcatctggctagatttatttcattgcacatggcagttcacgcttggtttcttttttttggggggtggtggtggggattctgttttcttttgtattgtgattgctggagtggatactcttgtttcttgccttttagagaaaatgtttgtggtttgtgatattggatgatttatttcttattatggcaacctaaggatttttcactgttgactttggtgattgtgagatatttcctcagaccctgaactaacacttgattcttctcatacagagaaatccacaaaaatgagatatggcacaaatttgtatagaagtgttttgtgtgaccacttatttctgcaagtcctaagtagccctttctagaaggtttccatgtaatacctttataaaaatatagacagtttgttaaaaggaaaacacaacgcaacaaaaccccttttcttcacacaattcattttaagcttcaaaatccctgaaaatccccaatctccttttgcagtctggttcccactctaactttcctcatctccccctgaaagaaagaaaaaagcatttcttccagggactgataagttgtaggccgatgcttagcaacagcattcctgtgctttaagtagctgcaagccccttgctgaactctttgatgtgactgtcagggcagatttattttgttttagcacattgtctacttgtccagatgtatcaggagataaaaaggagtcatgtttacactcctcccttttttttttttttttttggagatgtaattaaatcgtgtttttgatgagtcttggggagctccagttgaagaaaacaggaattggctggagtaaagggaagaatgaaaacttgcttggcagaatgaacacctgactgcgtcaaaaaataaagcataagtaccagctggcgtggttctgtgaagctggaggttttgttctgagtcttttgttccacttctgtggaagtccaaccaagaagaagggagaggtgcccgtccagcgctcacttgctgggcactatctgtgaaacctctagctctcagtgatctcttctttcttactgcacacaggcgcgcacatgaggccttaactcccttcttccactatcatttagtgggtagtacatctgtgatagatagttgtcaatctaagctaataaaattgttgaactccagtgatcttgaataaacaaatcttcaccgagctggatgagttgaattccctgggaatgggattgccactctttttttttttttttggtgatcagttttttaatgtgcacatttagtaacaccattctgagttctattaatgacctgcagtgagcagtgacaagcaggaatatgacattcagtactgctgaggacctgccaggcagcggctaacacgctcgctttcatctgcagctcgggagacactctatttgcatcctaaataggttacactacagcacccccttctgccgactgagctgtgtgacaagaaggcctcactacaactcagttttctcccctgatgacagccctgaaggccctttcacggctttctctaacctttctagccttcccctttggtccctggaggagcacaacagtgactaatggtgtgcgtacctgcactcctgggggcttcatttggattatacttttaattactcattcatcagaggaaaggaacaaaaaccatccattgaaggagacagaaagatgggtataacaaaaagaaagctgagccaagcaggtgctaccttagatcactcctggctggggtccctcctgccagatcccaaatcccagacagacgccactgaatgcatcttagaaactacaggcttggttttgtgtttcccatttgtagcccagtctgaagtacaggaaggaggttttcctttgtttgttctaaacaccttttggatgactccatttggcagaagcgcaccttaaacttgtagtcctttcacatacgagaaatcaactgggctctgctagaaaggggtgtccacatggggaattttggagggaggaactatgcatgccacctgtccaacactgagaagccctgtttgcaggggttggggtatggggtagagagctcccatcagaggacagtgcagaggctgacttagcctgggaagatgtggacttattgttatcctccacccttggaggccagggaatgctatttgttcaatattttaagttcatttaatttaccatttagtatttatcgagaagatactatgggccacccaggtggagtagggcgctgccctcaaggagcaaagtgtctagtagggggacaactcaggcaaagcatgttgggagggagttaggaaggaagactaggctttgcaaagatctccagcaggatggggcacagtgccctgcgggagcaggagaacaccacgtgatgactctcagggtgaggagtgaaggcaaaagagaggctgagaaggcaggggctggggcagagggccttctaggaaatggatggtgctctttgcttaccccaagagcaaggtgaatcactacgtttttaagcagagaggccccagtttccttgtgaatcttcgtggagtcctttgagctctgtaaccatctgggttacaggtcttctttgtgtgtctcactaccatgccttacccttctgtaatctgtctgtgcaagtgcacttgcaggataaacccaggagctggagaaagcagaggagtttctgtggccgtgtttacctttcaaaacctaggaatcctggatatggaataagagaaaagagggcttgtagcatgtgtgggccctttcttgggccctttctatcttataattggtacaaaagacagtagatggtagaacggagtcaggaaaaatgttggaaaatgttttaatggatgaaaactcatttggaaagtaacctcaaaacatcttttttctttttcttttctccctcccttcctctttctttctttcatggtcaggacattggactgtcctgagcaaaacatatacctagaatgggatctcccacccagggtaggttcatgcatactttgtcagtgactgagtccctctagaccacaatgtgtttgagagttgaagactaagatgggcacagggtagtgtttctttagaaaataaacttaaattttgcatttcctttggcttcagggagaataaggctgctagaatggttagaaatattgcacaggacatcagacttactgattatgatacttgattagtcatttttcttgtagtaatcatatatttgggtctggaatctctcaaggaaatagcttcacacatatgtatacgtttagatgaatgaaacttttgatgttaacagttattgatagtataaagcaaataaaaaaggcctctttcaagaacggctctgtgaataatttacagaaaattttgaaaaaagaaaataaaggagaaaagatttttgggggttatttctcaaatgactttccatctattaaactattttccaccatttcccttggctccaatctactatattaactatattttataataaacacattagtattgtgaaaattaatatttaataatgtagagtccttatctagaaaagttaagttcttatctagaaaggtacacaggctgaggattagtattaactttacaaagaaagattgggtttggaactcagagtttttttatatccttatcctctcctctgcaatcaacacatacacacatacttttgcatactgcagcccttttggaattccaaatgttagcatccaagcttcatggttcttcttcagattttagctatcctgatatagacactgagagcatgtgggctctagcccagaagagttttagcagcctagcagagcatttgtacatatccccctttggttgctatagtgggtgctgttgaattgctaagcagagaatcctgcctactttctttgggtctcttgggggaaatgaaactcaagtgtagcagctagtcctaagtctgtaggtcttcagttccacatcctaagtcacacatgacacggggcatggatcttcaggggcttacctaagctgtccaggacacattgtcctcatcctcaacacaatgaacctggaggcttggatatattcaaggcaaacatccttggcatctcttttagaaataggcctgaaagataaagagggccgagtgatagagtaatggggaaatgcttttggaaaatgagagatgcacattagaattaattttcccatacctttgaggtttgcatatgtcaaaattaaaactttttagactgttgttcccagaggacttcctcgtgctactcttttgtactggtcacatattctcttgtggtattatctgtttaatgtgtggacaaaatgtgtatgatgtctcattcccagaattgataccagtagttgcttgacacatgctaattagtaattaaatatactgtattactcctcacttaaacagaacataccacactgagtttaactttatcctgttgacatatatatgtgtggaggagtggaggaagcctggggtgtcatcatttcagaggtctgttgcagcatcttgtggttcagctcttagtctagctttttgtggttgtttctttttccatgtcatactgtgaccccagcagctacccttgcccacccctcatgttgctctatttagatgcctgtggctgtttttaatcttctgtgggataccaaagcttagaagaataaaattgtatgataaacctgcctgatgtcaactaagatcctgaaaggtataaactttatgatatctgcaagacctcgtggggagggttttctggaggtggaggccttttgttgatgttgatgtcaggattgagccactgcataatgagttcagtttggcctaaagataatgatgagatgttttgaatgtctgggatgcagtgaggggctcctgaagacttacacaggaggtcgtctgctttcgaaggggaatttgcccttttggcctctttggtgtccactacactgtattctgggatagacctaactctgtggaaccaccatgtgaccacccttaatcaatagtggtctgatggggccagctgctctctcagcactaggagtggcacaggagccaggctcaatcaggtagagggttctttctcatgggtgaggagattctttccaggataggcacataacccaaagcaggccacggattcccagattttgttggaacttacaggaaagagaaactctttcttttgtctttgaagatggtgaggtacagatgtggggggctcctgggaggccaccacgtggagaaaccaagaaacaaagctgagatagaaatttctgatgagaagtttgaacacctggatctaaccgtatatgaaaccatataccttgagctcattaaagccccctgctcctctttttaaacttaaagcactttgaggtggatttcatgacttaccatcaaaaggataatcttattttcctgaactgttcaacaagggagattctacaacttaccctggaaatgtagcaagtggtccccatagagtcattttggtcaagaattcttaattgtgtgtgacttaaatttcattttctgacagtctctctgtaatgtaaataacaaaccaaccctacttgccctctccccaaatcaaaaaatcctcaaacccaggaacaaaattttgattagtctactccttccaaagacaccttcatctacttgaacatcaattttcaatggtcccttcaaccttctctttaaatactgtctttattatgcaactttgaaatgatctacctgtagatatgtatggcaagtgtcaacactagtgagccatgagaatttgtcatagcagcgatctcacaagcatatcttgaaggttttcctgtggtttcatcctggcatctggtcctgaaagacgaagatggatagggagccacatggtggctgttcactggccccaggaaaggccgtgcttgtttcccctcccaagactacttccatggaccgagacaggtaactgcagttacccagtgactggaggagatggagaagattccagtagaaccagccaatctaaacccaggtccttctctgtgaagtcacctttgctacacatcagagaccatggggctgctgctttctcaccaatctctctcctgctctcacctctctcctcccagcctggggatggagaagccatagcaagcacccatatggctcacattttcttctcctcaaaacctctccccatagttctgtctgaatctgaaagtgacggctccaattaagacacaggaagaaaagaaatataatttctaagtcacttggcctggtgacatatatgttgggagttaggaaagtcagtgtgcggcttctctaccatcccaggcgctgcagtcaaacaaatcaattcagccttcagaggggcatccattgccttgtgattatgtttgtgtaaagtcttggggtctttgatcaaagaatggcatttcaggccagtccctaatcctcactgccttaagatgtttaaatgggttaaaaaaaaaaaagttgataacagctgggatttaaatttgcctttgcccagcttttgttttgaaaggacttctattatccgtggcttcccttttcgaggcaaagatggatcattgggtaaaccaaaaagggaaagaggatatgggaggaaatgggcggggactctgaattaatcttctgaggaagaatgtttgatcagcggggaggaggggatgaaaacctctgatgctgacagcaggcacctttctgatgagggtgtgattggcacctttgaagcttcagtcaggagccagtgtccagtgggtcagagcttcctctgtctgtgggtggtggaggtaataatgaggcaactggaaggattaattgcggacaagcagcaggattacgaggagggcttctcagctccaaaaggaacagttcgaggaaagcctctgatctgtcagccttagaggaaattagtgggagcagactcgagcaggcttaaaaaaaggcatttaggatattaaagcgaaatgtgaagaggatattaaaatagggcaaaagggcaaggagcgctgatcttgaaaggcgggtgtctccctcttattactaggaatttccaagttttgcccagatttcacagacaccttatttttacagtccagcagagagattttacttgcattgcaacaagttaggggagggtcagactggatttgaggtggcacccaaggtcctgtacaaaacttgtttgctgtccaccctctggcagtttcagaagctcctgaaactaaggctcctggtataattttacaacaagccagcgcattactgacatcctatctgcattagctatctgttgtatgttttacttcttacccttctggttcaagtctggatgctgccaataaatcctgtgttaccattaaagaggccattcatcacgcttcctaatgcgattaatcaagatacaccacagtacccttaaaatgagatcattttgataaatcatgtatgacatgaaaagactttattccttttaagtgcaatttagactgtaatttttttcctcatttatgattcatgggagaaacatggataaaattcccttgcacagttacaccttatctacagcaataactcaaaactgcttttagatgaaaattcagggtcttattcaccaaagctgaatgccagctcattattttctggcgttcagtagtccaaaaataatgtccgcacattaagcggcattctcaaaaaagttggaattggccaggctccaggcacatcaattacactccatcatccttaataaggaagaaatatcagatgtcctcttggaggttttttgaatcagtaatgctcagcctttaccttcccaatttagaatgattgggaaacaaaaatggtagtaacaaaaaaagtatgggaatttcagggcctttacatgactcttctcctgttgcataagtctcaaaagaggtattttttccctcccatgcggttcatgcttccttttccattccccttttctcatttcacaaaggaaactaccattttgttaggtctgagttttgtttctaagctgctgtatctgtgatgcaggctttcccctcacagctgtcacaataatttgggaaacgatattcataacctccaatagaaaaataatttgaaaatgtgccttctggtgagatccatcaagtttaaggccatatttttggttaaaagggagacactgatgctattcattaaactgaaaaatggcttgttttccactaatattgaaataaactctggatgaatgttaagtcatgctggcatgcactcttattgaaagcaaaaggaaaacacagatatatttaatttggacatgtaaagtcaacagagttttaggtctttcatgagaaagggaatcaggaagattggctgaaacaaatgtgaacaattagaagttcatttgcctcttgcaaagagtgagagcatttaaagagggattcagtgtctgagaactatagactcacttgcatttttttttcaacccctggtacctatgaataaagaaataaagacttgatcaacatgtaatttatttccctgctgttcttagagattcatttgggaagcagaacaaaagccagtatttgactctgtttttaagtaacccaagaatgcacacgtatcctattcatgcccacttaacataaatgcagcaaaactcaagtttatttgggttatcacatttatgctaatgctctgtactttaatcggatagaaactgacataaaacaaaagttccttgcatattattcacacatttaaatgaaatttcctgtgcttttaattttttctaatatgaagagtcaattaagaatctaaggccattaaggctgcacttgccttgtttaggtttccatttcacatttatgactttctatttttgtgaaaaaagatctgtaaatttgaaaaatatgcacgtatctcattaaaaaagtttcccagctctagcaacactcagcaaatctccaaagaatgcaagtttaaaacataaatattttaaggccccataaaattggcagtaaatatttttccccctttaataccatgttcatttcattccaatttactaccacgattatattttccaaagcggcttttaatacaatacacaattatttcatatggggttgggtaggtcgcctcattaagcctgcaaagatcaggcctcttgtgatccccacaaatatacttgcatttactcctaattaaaatggccctcttaaattgtctcaagttcattaatataaataagaagctaagcaaaatagccacagttgaacagttagcagggcaagatgaccaggtccccaaacctcacacagagcagactgtggtatgtatgcagtggtgccctgccacctgttggctctgcttacacataacagggtattgatgtccctcatggtggtgcagtaaccctctctgacccctatccctagttcatcatccccaagagaaaagaagaggcctttgagaatcccaggcctcctgatttcccccatcattcatttccttggctacatgtttctcctgctaatgctaaaaatttatggctgagcacattaagggcagtgcgagtccttccctacttctggattatatcagagtttcctgtcataaggaaatccaagatgtgtcctcagctgattgcatgtgacagtgtctgcttatatctcaggaatctgaggcatgatggataaactgtcagttttgaaggatgatattttctccatatttccattatgaactgggctgtcatctcctaataaatttcttgcattggtatcaatttatttttacaagcagagggtctgatgtatttgggaaaggcactgacagcagatctggcctagcctgacagagctggcttcaactcattttggaaaagtactttggttccaaggacagaacttgacccgtagccctcaagattaaaaaaaacctccgtgagaggaaaagagacacatgaggcaagttccttcttttaagccaaaataaatcaagcccttaggactaccatgacataatatcatttttaagacagtcctacaaacccagttgagatatgccacgtgtagccttctcgtctgagttagatgagaccatctaaatgttgttagagcatcacaataatgcagtgaattgatggatgaattcggattataatgaagctagggatctcacaatttttgctcccagaagggatctcagtagtgctcttctgcttgacaagtgagaagcaaaattaattcatataatgcctatttaattatgaaatatgggcatgtctctgtcatggctactgtgaagggcagaaaaagctatacaacatgagctttacctctcaagaaacttaaagtccagttgaagagataagatattaaacaaaattagagtgaagtaagaataaatcatagctaacatccatgagcagtggctaagatggttgtttcttacccttatttaacatttacctttattgggaagggaggcagcataacattgtaattgccaagacagcagcaactggaggcaaactgcctggatttgtgtcccagctctgccaaggagtagttacccaagaacttaagtgagagctttgtcaggggacttaatttctctggtcctcggcttcctcatctgtaaaacagaactaggagttgtgactcctcgtgaaactttgtgaagattgaataaatcaatacatggaaagtgtttaacgcagttctcgacacaaagtaagtactaattaaaaatgctaataaacgttagcatttttaaactatcattatcatgattgtgactattattaccattatcactgttagtcaaaatgtggcttaaagagtttaagtcaattgcccaagatggagcctggctctaaatcttgatcaataaggcatcagagcacagaaaacagagagttaaacaatatacaaattgtgaattagtcaagaacagaatccttgaagcttagttatttttcttactgttctttccattcctagactataaaatagccctttctccattgcctgaaacatactttagaagctagttgaaaagtgttatatgtagtggtgtgtaggtaaatgcttaacagccaagtctctgggaaaaaaagtgtgtgtgtatacacatgcatatataatatattgcattttttagttatataaatgatgtgtagaacacaattaaaagtaaataacaattgaatatataatactgtttctaaaaaattccatacaatcacttaattgtcacagatactttcaatgattttggccaaactcttgtatctcgtatctgtggttgcaactgatgaacaactgtagttcccacttgatattcctttatcttaatgagtatgtcagaactttactcatttgttaatgacataagaaactactttgctgaactggataatagtttttgaatattggaagaatattttttcaatttttttgtgctattcacaatgccttgcaatacccaacaaagcaacttctcaaagaattaagaaaagattattaaatgagaaggaatatactaataccacaggtaatttttataaaggcagaacatcctatctataaataagcaattatatttagccaaagaggtatggagcacaagttaatattttgctaccattaggctacgacacaacatcctttttttgttgttgtttttaagaaatggaattttgccatgttgctcatggttggtctccaactcctgggctcaagtgatctgcctaccttggcctcccaaagtactaggattacaggtgtgagccatcgtgcccagtcacacaacattcttttaggttctatctgcaacattaacattttctccatcactttaagtttagcaaataagcacaccaatgaatcaagctctcacttgcagcatttgccagtttctgctgcaaatactcccacagtggccaatgtcaaactacaaagtgccatcactgaagagttggaaagtgactgcacatcattatatagtatttttatcatacaaattcagtagactcaatttcaagagcataaataacagtaaaattttgtaaaataattaagaagtgaggagtcttgttaaataaggtaatttattcaagtttaagtgtatataattttaaataatacctgtgtttaacaactgaccaaagttgctgaaaccttaataattacttcttgtaagccagtacaggttaacacttacacaccactggttatttgaacccaaaaggccaaagagatctgaaacactaatttgtctacatcgcacagctaattctttcatgtattattaaataagttgatagttttatttacttagcacgccacaaaacgtgttgcatattaccatgagttgattcatatctcactaccaatatattacctacctttgtatgtgcactaaataagcctaggagggttttctttgccaggcacctttgaacatcaagttcattgtacagtgcttaggattcaggctatggaatcgagctgtgttatttctcaattccggtctccacatactagctgggttttcttggactagtactataacctctctctaaatctcaactgccttacctataaagtggtaatgttaatggtacttgtgatggcagcggcggcctgtctggagcagccgcttcgaagattagcttcagtggggcaggaagggctggtgggagccaggaacagacaagagccccaccccctaaccagttgaaggggcgggagcccgcactccttggtgcagctgcagcttcccagccgcactctggaccctggcatccctgtgctctcaggggcctgggaagcccctgccccagcgggcttggaagtgcctgctcctgctcccgggcctctccctgctcccggtgcccactccagtgcagagcaaagttgtggccaagcccgagggctgtcgtgactcagctgcgtttgcgtgcactcagggcagcactcacacgctagcgccccctgctgccttggccccctccagactttgggcgtcagtgagcgcaggaagcagcagcccagggggtgctgagggcagctccctgcgggcctgtagacacccctcaacgtgaacagcctgggcaacgtggaaggcagacaggtccctgggcggaagggggtgggtgcccagtgaaaccccaccttcaagccagggatggcttgaagcctgggggccgggctgccagtgccgggtggagtccccctcctggagtgagaatttatgatgctttttccggctggcccatggcagcccatggaccaatcagcactcacttcctccctttgagcccatagacaccctccccactccaatgacctgcctgcagaaaggagctacatacacactgtgggtcttctgagagctattctgttgctcagtgaagctcctccctgccttgctcaccttccagttgtccacgtacctcattcttcctggatgcaggacaggaactcaagatccgccaatggccagactaaaagagatttaacacaaacagggctgaaacacgcctctccgcctaacacgttgcaggtaatgagaaggagaagagctgtggcccttcagggagcccagacctaggggctctccaagtcagggctgtgacgccctctttagggctctgtggttcctggcgtctcccagcttccaggcaccacagcattccctggtgcccatggtggaagctacttgcaggacgcctggtccagatgcagcctctcttggagccagcgcctatactggcacttggagctgcctgccccaccgcagccagcacacctggccgtgcgctgtggccgaaccccgtgctcactcacacaccccttgccactccatgcctggctcacccttgacagatgtgggatctgggccggtagtgccagctgagcgcagcctgctgggccaagtgtgtggaatgagcccagtgaggctaagcaaaactcaggcaaaggcgccacgggccacagacatttctgactagaaaactgacaccctaaggatcctgtgacacttgcattataaggctattgagagggttaaatgaaacaatgtttataaaatgcctgcatataattaatgccagaaatgtgatgtacacacacccacattacttggaggttatattacattacattctgattatgttctatgtttgaatatatgacacaaactaaatcttcagcaagaattaattagcagcaaactattaatttgtgctccatcatacttctttggataaagataattatttgtttgtagataggatattctgcccttattaaaactacccatgctattagtaaattccttctcatttgataatcttgtctcaatgctttgagaagttgtcctgttaggtgctgcaaggcattcactgtcaaattaggactggcccctaccatcttgcaaaagagacaggtgcccagtggacagtgaagcaggggagaatagagtaatggtcaggagaagggcatcatgaaaacctgagggctccaatgcagagagagtgtggggctacggaaacagtttgggctttaggagtcaggctgatttggtttctaatcacactctggactttagaactggatagccttgtacatgttactgatctttcctaagtgtcagtttttttcatttttcaaatgagaggaatataggacatatctcatacattggataaccattagcgtttaccatatattcaagaaatattaaatcctgtcacacactttgcctcctttctttaccatctccttctttttcctcaactcgtatttttcctcccttttttcatctctcctcaacctctgataggacagattgaaaaatatttgatggactaggcattatttcgtatcagccattgtatatgagtagtgttttaaattctaaatattgtaaattataagaagtaattatatgttaaataaagtttacaactccaaacatccttaatcacattgctagcaaaaatttattgatttagtttttgagatggagtctctctctgtcacccaggctggagtgcagtggcacattctcagctcactgcaacctctgcctcccgggttcaggcaattctcctgtcttagcctaccaagtaactggaactacaggtgcccgccaccacacccagctaatttttgtacttttagtagagacaaggtttcaccatattggtcaggtggatctcagactcctgacctcaggtgatccacctgcctcagcctcccaaagtgctgggattacggatgtgagctactgtgcctggcccaaaaatctttctatctttacttattaactactacttattcctaattttatgtagttaaaaaccacaacctatgtattattttaatgtttaccatgttgacttaatgctaggtaattaatatctttgcatatttctctctcctttgtacttacagttgtattaggttaccaaaagaaattatgatcacttctataatgtccaatatttagatggttttatttttgtcttctgttatataagtgtctgctaaaaatattttggaaccactgctctagatgatttgtaagatctttaacaactcttacattctgtgattgaattagttatgtaatagcccataaaatgcccaagccacagcccttccttccttttttcctttcgtagttctcctcctccctccctccttttctttttccttccctgcctttcataaatatttgtgaactgctactctgggccagatgccactgtgggcactggcagaactgggccccctgtagatcagatagaaacaaatgggaagctctgggccattgccttcaaaaggctttcttattccagagaggtttttgacataatcctcccctccccaccagcctctgctgtgaccagcttcttacttgaattacccttcagctccctcgctcagcttcatgctcagcatttgcccagactctgacctcttctccattgggatctttttcttggtctcttggttccagactcaccctcatccctaccttgccttttgttttcctcccaatttcttggcttctggctctagacaggatatggctgttcctgctttcaaacctgtctattattcccaacttaatctgtctgtcagtgacaccttctctcttgctttactgaaaggcatggcaccttaatctgtgagaggggtgggaagcttcagccttctacctggttctttagtttctctaacttaatccttcagaagatggcaagtctttacttttggattctggcaatgtggcccacactttcgtgttgaattacagtcatggtatgtagttttttttttgtttgtttgagacagagtctggctctgtcgcccaggctggagtggagtggcacgatctcggctcactgcaagctccgcctcctgggctcacgccattctcctgccttagcctccagaatagctgggactacaggcacccgccaccatgcctggagaagtttttgtatttttagtggagacagggtttcaccatgttaaccaggatggtctcgatctcctgacctcgtgatccacccgtctcggcctcccaaagtgctgggattacaggcgtgagccactgcgcccagcccatggtatgtagttttatctttgactttaaaatgttttacccatcctattatcatgaattgacttcttcctgtattttttggcagtatgttgagcacaagggttaattgtataattaatttcagaaagttaatatagttaatctccaaagctctctgttagtatgagtgagaaatgagtaagggcgtaactactgttataggtgtttagatgtcataatcaaagtcagggacaacattctgtaatgatccagagtatgggagtgtgagggacacactatgagttggtggctcttcataaccactattaatcatagtatgtttttttttatgacccagcaatgcaaccaatgttctcattttatttttcttggtattcttagcacagggcctggcatatagtaggtggttattaaatacttgataactaaatgagtgatgctttttcttatgagagaaaataaatgtttttagaagagtcagctttataccatggtttcaggggatgaattgtgatgaaaagtgaagattgcttttgcttgaaagaggctgactatttcccagacccaggatcactttctgtggtgtatgatttaagggtgagcgagcatgccaaagcgctccacttgagctgagtgatggggaatgagttgtagagctgtggtcttagatggtattttgtgaaaaacagtgggagatttatggctattaaacaactttgtagctgcccccttcttgtttcgaagtctgccaaatctctcctcctgtggtctgtatcaggttctttcagtgcatccaggacattcagagatatccaccggactgtagtttttcattgaatgcacctattggaaaggggcttgaattttatgcatttatcagttttggtaatcaccgagtgaaattctcgctttgcacgtctgttgtagaatacactgtatgtgcattgaatcttttccaagcgggttgccaaagttctaccttccttctttccattatggatattgcagagtgcagtatattagtggctactgcctttattgatgtgagttttaaaaattattagtaactctttgatcgtgagcaggagaagaatcaagtaaccttcagaatgctttgatgtatcttcagcagaaggatttataaggccagaatgagtgtttcaagccttgcgggggaaggggatacatatttaccatcatctgcttttttctattctagagctcactctcagtagctctagaagaaacagaaatgggatatttcatcacaaaaagtcaatcagaggtggcattcatccatgttatacaagtactagagaattgttacaggaatttttctctcattgtgggttcatgtcaatataggagtgcatggattagaaaagaaatagggccttttggtgtttttaaaaaaatttcaggcttaagtctgagaaattccaaaatgtagaaaacttttaaaaataatgaacacatgtagagatcatccagaatttgtggtttctaatattttgacatttgttttaagtcttctttaaatgaaagaaagaacatcatatatacagctgaagttcctttctctccacatcacactagccccagtcctactacactgccccttggcagaagcaaacattttcatgaatttagtgtacattttaaaataatttttaggtgtttccctgcatacatgaaatcaacaaattttatatttccataaatattatattacatttatcattttgcaacttgcattttcactctgtattaaatttttagacctattcaaagcaagatatagaaatcaggtttttttctcttaaatactaaatattattctgtcttactgatatacaacattatttttatttattttcctcatcgacagacatttgagttaattccaatttcttctgttataaataatgctgcaataaacattgttttatgtctcaatttgcagacctgtgtgagattttccgtagagtatatattttaagtgaaattgctgcaccaattttcaattttattagagattgctaagttactctttaaagtagttgaacgaatgtacattcccaccagcaaggaatgagaagacaacagtttctttttcctttgttctcactagtacctgctattgtgagacttaaaagtttgtcagtatgatgagtggaaaaatcgtatcttgttttaatttgcattgcccttagtcctagtaaatttcagcaacttctcttatgtttattgactgttcaggttttctcatctttgaatttccagacatttcctttgtctatttttctattgatttaaagacattctttttttttttttaaatttggatactaataatttattgtagatgttgcaaatatttcctgacaggagaatttaaaaagtaaaatgtaaaactataattccttgccataggcatttagaaaatgtggcaagagccaggcgcggtggctcatgcctgtaatcccagcccttttggaggtcgaggcaggtggatcacctgaggccaggagttggagaccagcctgggcaacatggcaaaaccccatctctactaaaaatgcaaaaattagctggatatgatggcacgtgcctgtaatcccagctactcgggaggctgaggcatgagaattgcttgaaccagggaggcagcggttgcagtgagttgagatcgtgccactgtattccagcctgggcaagagagtgagattctgtctcaacaacaacaacaacacatttgccaaggattcaaagatttaagagtctttatagtcttgaagattcatatttactcaaatttgcttattctcattttaggcatatcttcttaacccaggtaaaagaaaacattatttaaattttctattactgcatactcaatatacgatgggtgtactgcctcagtttcaaggcaagttctttattctttggcagatacagtataaatttaagacattttcttgtccacttctttcctatgataattgtgtctttctgaattgtacatctaatcctaaggttcagagaaccagtgtgaacatcactgttgaaaggatcacaagggcttcattttgaaaaaagccaagtcaaagagctggtagttggatcattgatttgtagttgttttcctaaacatccagccatagaagtcccaccaaaaggcatagtttgcaaaatcattctttcctggattattttccatgatgtgagtttatcaatggacactgagcaggaaagtaattaagtgctggtcatagaatgatgactgcaaaacaacagaagccacaccattttttgctctacctacagtacgaaacaaaactaaatatctcttttacgcttggttacagaattctaatgtgtagcacagtcagagatgtttctgaaaaggtagcatttgttccagtaattgtagaaaaaagctgtcatcaaattgtcaacagcccaaattgagattaaaagttctaagaaatatcactacacaacaaactaaaactcatgttggatttttgggtcttttttttagcaatgagatggagcagaaatattgacagctatggcttcctatggaggaagtatgatagatctagggaggatgacccctgtaccctcaccccatatgtcctgcctcaagcattaaatagatgccctatttaggacactatcctcatgtttcattcatcaggtagaaattacaggagaccttgaatacccaatagagagacacttggtgactgtagtatttgatttttaataattttgggctctacattcttgcagtgtgctaaaaagtggaaaagtcttacctactttaaaacacgtttttcttggtggttaagcttttatttttgtggacccaatagccttggatccaaatttaaacaccatatatttgccttggagctggagtgaagaaatgctacctgaaaactgttttctacctagggacagagcttctgattttgctccactcacactcttcctgtaagtctccactgaaagccgcttagtcaaacgtctcaaatgtcagaaatgaaatttaaagggtttttctagcaagtaggtctaatctcctacttagttttgattcctataatataggtaatctctttggagaaaaggcctgcttttagaagggcaaatatatcccatagaatgtatttcccgctccggaaagaaaaatgtagcattaatgaaatttactttttcatgaagcttggaaagattgttagcttcggattttgatcctagcagatgttctttttgggatattaaaaaaaaaagctacatttgatttaggaatctcagttaagagttacagcggtaatgcttcttgctactagcagctacactgtgagtgtggcatactggccattggttctgagtgatagctgaccccaagctgaagtactttcttttggctttagctcacaaggatgttgggttctgaaaagagagccttagcagcctgggccatcttggacacagttctatggttaaagagttgtctgcgtacagtgaaaaagcatcatcctagatgtatgttatgttattttcttttaggccttggagtgacacatttgttgataaccactacatcccaaatccaaatttcagacgtatttctcactgctgttgttaaactgagccagaatccccagtacacagcacaagacaatttatatcctttcctatggtgacttcattctgccaagtctttcatgccactgggctcatggaagtcagccctggttttccccatttatcctgggggcagagcttaacctcttcactagtatccaaagaaatctgctcatagccagcctttactttgtgggaattactgggtgaaggcctgatagaaatctaagcctttaacttttcctgtcttctgcctctctctttttcctcctccctcctttcatttcagcacataaactgcccccttttcttagagctattccatatgtactgaggcccctcaaagctttggatcttacccaacacttaccagaatattatctcaacaaaaacagctcttgcttcctaagaagtatcttggtgaataatattttctccaagctcagatcccaaggagacaggtctggtaaatgagggtatttggtatttggtgtttggtgttgcttcatgttgactttgcttttgtcacacaggcttctagtgaggacgttgccagctccccggagcgccactacacgcccttgccttctgcttccagggaactcaccagtcaccaaggttggaactcagctttttattgctctcagtgggtgcagggagggacacttggctgtgcagagctctggctcattactgctgcctcggcactttagaaagaacacagtgctttttaagtccttgatgagaaaaccatacctgtcacacgtagtgattttaacccatattaaacagaatttagtagcagtctattcaggaggcaaataaatctacggtataatataattttgtgatttttttttctttaaataaagagattagagtacttaaaaattatcaaggagatgttaactccagtattagtgatggagagaaattgggaaactcactaacatttataaaagtatcgttgtttgagaatataacaattaacagctataatttcaaaatgaatgaactctatgttataactaaaaggaattccaatttgcctggcaacattgagagaagccatgtgcagtttttgctgaattctcttattttcaaaatattaatttggtttactcagtttttccaaagccttgcatgtctgttgccatctctagagtcttcagcttcaaaagcagacagaacactgacatgaaatatcatttgaaaatgtcttatccctaagttggctgttttaaatattgtttccccaagaaggaaattccacttgtacacgtaaaggtgaaagtgaacaggggctattctagcattgtcatcccagcagcattgcaggatgagcaggtggaagaacaggctgtggtgatgctcagaaagtagtgaatctgaccctccaagtcaccgtctgggctctgggcaaatgggatacttgtattctgcaggaaacgaagaagagagtagtgcaggatttccgatgtctgtggcttggacctgtgttgcctgtttggtgtttgggcatcaatagaacttttctacatttaaatatactttagttaattttgtgaaaaatcaattttgctcaaagtcagggagaataagcagctgccaacctgctatgttttgaggggcatgaacaggtctctttcactgaatgtccttttgaaggtcttaagcatacatccctttcgagactgtttttgggggaatttccctaaaataacaccacatctagatggagcaacaaattaacccttaaattagcctcatatcctcatgtgtttatttattggtttcttgtatttgaataagggtatttttactttagagtcattgaataagttgcatagaaactgaagtctcagaaacctcacagccacttgtaaagtttatctggccctgaaattgagatttcactatggagagatatgatcagatagatgataatcattaggaatagggcaaatatcatctgtcatttttaacagtaatataaaaaatctgagacttgaagaaaggaaatataacacaatatagttttaaaatatttggagtaatatttggaatatggaaaaatgcctaaagtagttagagttcaaataagtgctcttggatgacatcagggcttaacatcaatgagagaaatgtaaagacgttatttaaagagagccaacacagacatctcaattttactgaagaaaatccctacacatttaacatgttggttgcctgaccagtgctgacttggttgttgataaaagcaagtccatatcataaaatgacgttctttgggctgatggccataaggagaccaatagagagaagaccgaagaagttcattaaagctggattattgaactgatctatgtaggagaaaggtgagactaatatatttcagcttagcataaaccaatttggcttgaaccaacttggctttccccaagtgagaaagccattattttttggcactaaaatgaaaccacttaatactatctcatttttttagtatttaaaagaattatttcaagtttctgatcatgtacatcacgaaaacatttgaatgtcatttgttaataccttcatgcaaacagcttacaaacatttatgcagaaggggacatttcatggtgtgaggacaaattacatcaattctttctcaagtgaaattctccatgatgtctgaaacttttgtctatacaatcctcagtggaagttctatttgcaaataattttttattcatcgagttcccaatctcttttccttccacaccaacaactacaaaaactggcgggcagtagttcatgtgcaaattgctatttttctgtacatgccattttccctttacttgtccttttatgtaacttccaatgtcaactatgataggtccaagattcatgtcctaaaaactgtagattcaaatgcaaaggaagtccgggcttagaataatgatcaggagacctgggactcaatttttccatctgttgcttgtagataatccatatatcacagggatagtaacatgtcgtattttgcttcctgcatgaaacttttactgatctgagttatgttgattttcttctttctataggtatgtctgatatttgtttctatcttctaggtgcaattgttcatattctactttgtatgatagaggtcaggttatgtgtatcttaaactcctcataaatgaaaactccctgagaggcagcagtaagtccaaatcatctttttttttttttttttgagatggagcctcaccctgtcacccaggctggagtgcaatggcacaatcttagctcactgcaacctccgcctcctgggttcaagcgattctcctgcctcagcctcctgagtagctgggattacaggtgtgtgccaccatgcctggctaattttttgtatctttagtagagacagggtttcaccatgttgaccaggctggtctcgaactcctgaccttgtgattcacctgcctcggcctcccaaagtgctgggactacaggtgtgagccaccacgcccagcctcatcttctctttgacatcagtgacactgcccattcttcaggtatcagcttacatatcacagctccaaaggaaacttgcctgataccccctacacacttatattaggccagtgttccctgttcagggattatcttcctagaaaggccataagctgttgggaagagtggttgtgattacatatgttcaccactttatctgcaatgcctggcacagggcctcctacctaaatggcgctccacatatatttgttcagtaaaggctgagtaataggaacccaggggaagggtgagtatcttagtcacctctgcgaggtaacttgattgcatgtgagaaaggagaccctgcttcctttgggggtgaacacactaaagggaaaggtccagctgtgtggacctcagacctcaattctgttgctttcataaacccaaaccatcagggatgggtgtcatatgtgttcattcattaccagaaagcatttagtcacaaagcctaacttctagatagttgattattttaatgttgtagttttcaagcattggcggtttgacggtagggaagggaataggatgaattgaagtaactgatggaattattttactagaacagaaactctcaaggaaggggtcagactctcagtaagatacagattgtggtacacacatggatttagaatggtccacctgaattctttctgagaatgctgccctgggttggagcatatctttggaatgaggaggacatgggaatgtgtcagtaatctcagttgttccctcgtggcaatctacatattgtatccttggctgtgtccatgttatgaggagcgctaaaatatctgttggagaaatgtccctttaaatatattacgagtacaggacatgccccagcgtgccaggtattgccgttctttatctggtagctcttagaagtagaattcacatttgtacagggcattatgtcttttggggaaaacatttctatttagaatgtaaactatatcatcctcagggtaaccctgtaaagtgaggagtgcaaatatttttcccatttaacagagggagacatcaagaattgctggggatgatggagcaactcaacaacaggcaagggaaacaaaatcaaagccctgtgcccttaattctcaggtccccctgacctttgtcctttacccagtgcgtatgaagcaagtgtaggtaggactaactgtggccttgagctggaaggaagagtcaaaaaagtagagggagaggcatggcctggaaatgttcaccactgccatgcgtttccaaagcctgtgctaaggctgctaggagctacagcatcccacttgcctgcctctgtcaaaagaattgcattactcctgccctgccattctgtatttttaaattacagaacaataaaatcaggagtggagaaaatttgaaaacaaaaagggtgaatgctccatgtcagtctggattcagacagggaaaatagaaggcactgtatgtattccagtaatgaagagttttaatggaaggaattagaggtgctgccaccacccagagtcacaacctcagcactgaaccagtgattctcaggagcttgctggaaagtttctgtggatcacaggaacatctgggtgtctcccactgactttctctatctgaagcaccagtgaggggattctcacgttcacctggagactgtttcagtcattgctgttatccatgcgttgccctgctcctccatctctctagatttccaaatcatactccagcatctctctttggcccaactctaacctaggctgattcactgaaggcgattctccgatgtagttttcagttctccctcgaagctacagagaaaaccttagaagaaagcagatggtggtaatggtaaaacagataatccagcacatctaccataaccctgccttgccaatagctatcatgtggaggatctcatttcaacttgtctgcacgcacattttgcaagataattgcaagcctagtgaatgtccctgaattatttatttcctgatgcttatactatagtcttgaagatatgccatagttagcttgccatattaaacattgaacttgaaatgtgtaaaagaaagaaagcaaaaagaaaaaaaatgaagaggaaatttgctgtgaaacttgcttagagatgataacctttctactttgactattgttggcaatcttgccattatttttattgacacagttgttaggtactcatcttcctctccaaccaggggcttggtctatttgtgtttgaaattgattgctgggactgtcacaaagtaatttatatagcaacttattataattagttatcatttgcagtttcctaaatgtgagttgcattttatgcttagcaattgatttttctgtatatctccatgaagcagctcaatgtatgccatccaaaaaagaagaaaaagaccgaaagaaaaactgtgtttttttaaattatttaaaacatttttagcctgagatatcataaaatacgtttccacagaagacataaatacagagtgttttgcttcaactcattaaatcgccaaagtgaaagtgaataaaaggaaatttaaatgtctgtatgtgaagaggtagcaatgtagacaaaaatgtttgggatggggagatgttggccagaaaaacttcatgccaacaagcataatgctttcaggagggctcaaaaggaagttacttgatgactaaactattgctcacaatttgttttgggcttataggattcggaggtgcaggggcagaatgatgcgatacttttcctcatctattataagggtcacagcccataacaaaagacaggttaacaagagaagaggataagaaatttacttaatcaaagttttctgagatgggggggcctttagaaatgaaagggaaaactagttttatgcttatgttgatgaagaatggacagctgtgtagaaacatggttagacaaagggtatgatctaatgggaatagattgaggggaaacctagcaaggcctgtctgttcagattcttcttggcctctctatgtagcattccttcccctggttataggacagaaccctctgaaatgagagtcttcaaaggagaagagagagtgtgaattttctaggttttatggctggctttaagggataggattctagtttcgatgaccccacttagggaagaggaattctggtttctataactcactgcagggcagagacagagggatgagggagcaggtaagagaaggccagagagaccttgcttctgaggcccttccagtgtcttttgtttcaaagcactcagcacgtcaaggtgccacaatttcgggtattgtgttttgagccctgtcagaggcagtatgtctcttttagccaacttttagtttttcatttttagatttctactatcttttcatgtcagccacagggaatgtgaaagctaagtaggtctgatcattataaacaaaatctacagaaaacaatagcaaagactcaggaaaatagatgcatttatttaggccagcttaatagcttagcatcaaggaatcttttgcctactgcctcttggttatcactgaccatttataaacatgaggccaggtgccgtggctcacgcctgtaatcccagcactttgggaggctgatgcaggtggatcacttgaggtcaggagttcgagaccagcctggccaacatgatgaaaccccatctctactaacaatacaaaaattagttgggtgcagtggcaggcacctgtaatcctagctacttgggaggcagagacaggagaattgcttgaacccaggaggcgaaggttgcagtgagtggagatcgtgccactgcactccagcctgggcgaccaagtgagagtccgtctcaaacaaaacaagcaaactaacaaaaagatgggatgaacaacctgatggttctggagcctttgccacataggtctcacctaaggtcaggccctatgagtgagacagcctgcttatatattgccttctgccttccagaatatttttattagtctttcaagagagctaagcatcaaataatttctcaaaaaattgtcaatgactcattgaaagttcatagaagcacaacagatccaaatttctcctgtggataatgtattgaaaagtggcaaaaggaaagagagagaaaagaaaaaagaaaaaaacctccttagagacaagaatatgtttttgtccaggggtcctgtcaaataagagtatggccttggcttgtatcttttagacttcttgccaccactgtgccttgactgtgtgggggaagagtgtgttggttcctcgtgcagaactattattagcatttgctaattatgtaaaatgatttcctctgatgacattttcaacagaacccattactttagttttctttccttcataatgcttttatgggcttataatcttggtggaattctcagatgctgagagatgctaaagtttcctttatttaatcgaggtgactagtgatttgacagtagtggttgacaggtttattttatctgcgtggcagtaggagtctattttcagtgtgtgcactctgttccaaagtaaaaggactttactaagtgctgaataaattgtactttcctttgattctagaccttgctgaaatggtttaaaaactccggtctgggtcatcaaattcatctccttgctactttgcagggtcaatagcttcactctgtacagagccgggctgggtggattggaatggagggtagtgtagattaaaacttccgcatatatatagatagatgtgcatgtgtgcactcgctgtctgcgagggtggcagtgatggaagagcaagccaagtggaattgaagatggatgaatctgttagactattaccaagactggcatggagtttagccaggaactttaagcaacctcctttaaacatttgaaatccataggggtccatttcctctccttttcctccaaggatgatttttcatttgcagtctctgagattgctttatttctattctttgggcagaattgtggtatacttgtagacagagaagggctacgaatctggtttttctctcccagagcaaagcaaggaggaaaaaatggatttcagttttcccctgcccctcaaatagtagcaaaccctacttctgtaaaatgagaggtcagaatgacaactcttcccccaacagacagtcccaataaaaaatgatagtaaaaacatgctccctttatcttaacaaaatggaagcctagaatgtacagggtggaaggttctaaatgtgcttatgttttagagtcctgggctgtttcttgcccctttttataaagaaaaaagtatgatatggtcagtaagacaaagattgctatgagcacagtcattcaagaatctccccaacatgtcttcatttagtacctattgtgtactgagtgtattgttaggatttgtggagaattcagaaatagagaatattatctctatcttctaggaatttatggtttgattgaggagatcccaaaaatgaagtaataccaaccaaacaatatattatatattacataaataagagctctattagttggtaaaagctgcaaatgctctcaacgtttagaaaagatagcgtgcaatgtaggtgagactactcaggcatgactctttggaggatgttggcactgagctttgaagaacatgttaagtggagagcaaaagaagggcattccagaaagataaatgggtaaagataaagcacaaggacaagaacaggtagaactgatgagagaaagggaccctgttttgaaaaggtcagaaataaggttccttatgtaggataggtccacattatggcaggccttggacagacagaagggtttatattttatttaaaaccatgctgtaggattattaatctgcaagcagtatccaggggtaattggaaaggagagagcctggattcaaggaggccatggtgggatgggattggaaggaaattgtttcagtcttagaagccttagatttccagataaccaggttctgtgcccatagactgtgatgcctccaaagagcaggtttctagcaaaggtaatttagaaaacaacttggtaacagatggggaagacagctggggcctggatagatactgccaggagagcaggagtgggggccatgcacagggaaccttatggccactatggagttgttgtatgaggttgctgatggtttggtcacgagggctcaggcatcagagaaactggacagtcagtgtttttcctccgcatgttattcagaatatttctgatgttggcttttgaaactaaaacacagggcccaggataatgttacaataatccagcattcgatgatcaaggcctggagtggctggctggctgactgggagtacaaaaaataaaggaaggaatatgagaaacattctgttgcaaacacaatagaccgaatactgattatatttcagggtagagagaaacagaggaccagaaagctataaggaagccagcatggtgtgtgggaggctgtggtctctgcctgttgcccctctgtcggttcatcctcatcacaggattctctcccaccattcatgcatgaactctaatctggcctgttaaatggaagaccggtggagttaatgtagtggagctgtggcagcaggaacaaacgtacaaaaagcaggcagagcagccacaaacatttgttctcattctagcctttggcttaaagatgagcttcattctcttaagaactaataaatgtccagggtgttttatttctgaatcttgggctcctggaaggagagtgatttgaagccaatgcttttggtctaaattgttcagccgtgagctcggcccagtattaacttcctagtcccagttcttctgactctttttatttccctgtctcttgtagaaaactttacccctgccccaggtttttcctcatgtagtgattttacaaccttttttggaacaaataaacaaacatctggaatcatgtggcacatttaattaaaaagtttgcatttggccagaaatggtaaaatcatgaaaaatggcctgtcggtgagctcaagaaggccaaatgatgacgttgttggctgcaaacggactgaaattgagggaagtgaacacctgctcagctcggcctgccgtcctccagcttcctcctccagccattaatatttacagcagtttctttatccattctaatgaaattttttggttggggctggtctggggagagggctgttacttttccaataaccttggatttgttgtgatgtgtgtactttataaagggtgtggtattgggctttttgggcttttcatttcccttgctcagaattccatatgcttcaggtcactgcaggggcctgttgctgtttcttcaatcagtcactcaaccatggttttcatgagagccgtaacatgtggaaccctgcaccagggcatgtaggagatgaaaaagaagctgtgggctctgccttcaggaatcctacagtctaattggagacaaggtcctatgcagagaaagcagaggccaagctagatggaagagtgcagagaagggagggatctgtgatgatagaaagattgggaggtggccttggatgaaggtgagaactgagttgaaagaactttccctgcgtgagttccaagtgtgaaaggatttaggaagagatcaagttgtggattcttgtctagtttctggtcataatctaggtgaaagtagggggtggatcatttaaagcaagaattagatatgattattctacatttccagttagcttctcctttgcaagacatagctagggtgaagtaaaatttaagttttgtttgcaaattaggataaaacattaagatgatctggctttgcagagtgtagtgctctcatatgtctcccacatgaggatttataccgaggatgagattattcttaggacaaagtgagaagtttttcttgttgcacagaatacaagggaagtagccaggtgctgcaaatatagtaagcactgtttaggttagatccaaaggaagtatgaacccataggtatctgagacatgtctcacaataaatttagaaagtttattttgcaaagacttaaggatgcgcctgtgacacagcctcaggaggtcctaatgacatgtgcccaaggtggtctgggtatggcatggttttatacattttaggaagacatgagacatcaatcaaatacatgtaagatatacattggtttggtccagaaaggcagataactttaagtggggggagcttccaggttataggtagatttaaaatttttctgattggcaattggttgaaagagttgtcaatagaaaggaacagctgggtgatataagaggttgtagaaaccaaggcattatcatgcagatgaagcctacaggtagcaggcttcagagagaatagattgtaaatatttcttatcagacttaaggtctatgttgatgttaaatgctggttggcttttcctgaattccaacagggaggagggcataatgaggcatgtccaacccacccccgactttccatcatagcctgaatcagtttttcaggttaactttggagtgccctggccaacaggagggagtctattaagatagttgagggaggcttagaattttatttttggtttacagaaggatgagtattgttttgaactagggtgtggattggcaagggagatagagaaatcaccattccccaaggccttttactgaaggacatgctcatctctctttgaggtagcctgaaggaagtgaaatgaaacttaaacaattttcaaatcctgactggatgtaatcctgggttctctatgtcagtgctggttcagctttttcataaaatgaaatcagggtttcaccttgaccctcctggacttgtgcaagcacagggagatacaggatcatgctggacggagcataacttcagttgccagaggagttcttagtcctcagctctttattattcttgtgcatctgtttccttaaatactctctgcagaagcattagcatgaaaataaaagagtacagcaacttggaattttccatttgtagcttccttagtctgtggggtcaaagttctgtcctcagggatgctaatgcaaactctgtgtgctgttccagggcaaatgtttctcaactaaatgacaagagggggtggggagccagggaaataatgcagtgctaattcccaaacacagactgcccagaggtcccaatttaaattgctgcttccccaactctattcccaccctcccccaaaggaaaaaaaaatatcctgtgttgttaggacagacatctgtgtgagagcaataaaacagtcttctcccttgtggattagctctttattcctttatttatcttgctatacctcatcagtttatcctaaatcaaggagagtcaaagaggataagatgcagtcccttttttgtttttgattaaggaaacccatacaaccatcctcctacacaaatttcttttctcaagagatagctttccttgttatgtctaatttctccccacccccctttttttaatctgcctccttggaaactctctggaacttttatttcatataatgttcaaatcagaaaatgaaactcctccagagacaggttagatagggcagtgaatgttggcatgtctgcatgattctaaagtacaaggggaactaggatagcagacttaacatattccatagcctccatttcttcttccaaatccctggaagtttattaattcattcaagagatatctatagagcatgttctatgtgtcaagccctgttcaaaacattagagatagagctgtgcataaagtgggcaaacatttctgccttcaaagagcttatgttctagtcagagagaggatctataactaagataaaaataaaaccaccacatggtatatcggtactaagatgaaaacgacagcagatcaagggcatgagagagtatgtgttggcaatttaagatctgacagccagagaagtcaccactgagaagatgatggtggagtaaagacctggggaggtgaggcatggaaccctgagaatgtctgagagaaaagtggtccaggctgaggaaggagcaagtgcaaggccctgaggtgggagcgtgctcctggcatacatgaagcacaaccaagaggtcagtgtggctggagttagtaatctagggggagagtggtagatgaagccagaacaataccaggggctagaacttgtagcccattgttaaatgttaaacccaggagcattaaaattttaaagaatttatttgagcagatggtgattcatgaatcaggcagcactagattgcacgtggttcagggctccaccaagagggtgtgagggaatattttttataaggtgtttgtggaagccaagacaaagaaattatttgattggttaaagtggaaagtcccagttagaagttagttagtggtttcttgttggttaagcttaagtttcattttactgcttacattgacttgggttttggtttgcttatgtaggaatccaaagtgctggaaccatctcagcctaatggcttcctgatagattattttaacactgtttactgtgactaagacaggaagctatttcaaggcagaagaaataatagaaatgctgttacccttctccttatagaaaaaaaaaaaaacaattcccaaatgaataactaactggaaaagaaagaaagggtactgcttttgatcagaaactatagatttcctgcaagatcacagcccaaaacaaatgcaacagagtttcaaaatgcagaaccaagacccagcagggtggcatatacctacaagctcagatatacctgacgtaggaggactgcttgaatccaggagtttgagactgtagtgttgagtgattgagcctgtgaatagccattgtattccagccggggcagcatagtgagacacagtctcataaataaataaataaataaataaataaataaataataaataaatggatgtagaactagcttcaggagttctctaagcacagagaaagctactgggggcctcatagcaggcaataatttgggcttcctcagtgggtacagccacatgggtcacattgtctgtatacttctctccatccttagtttaggcatcaagtaacagagctatctctaagccagggcagtaagtatgagtgattggatcagaaaaataagatggcaagagttggtacaaatgtattaagtcataataaatgagaatgaactagactaaaagacagagcactaccagatttggttaaaaaaaaatgtaaaataaaatactttttcaagaggtgcatgtaataaaatgacatagaaaacttgaaaatactggaattaaaggacagaaatactggatacctgctaacacaaaatccaggaagagcaatgttaatattagacaaaataagactcaagatgattactgaaatgacaaagagggttattttgtataactatgaagatataatgggaatctaaaacaatcatgaatcttaatgtacccaatgacatggctttgaaattcataaagcagaaacttctagaaataccagaaaaaactaacaaagtcaccatcatgaagactttagcacatctcctatgaaaatgacagctaaatgaatggactttttacaataccttccttttgttacatggaaaataaggtgatattctttaaaaacctgtatgaaacagtcacaaattggctcatatccacaaactggctcataaagaaaagtgtaacatgcttctttcaaattaactgaccataactaagtcaaattagaaattatattaaaaaaggaagacttccttccccctccttccaaaaaaaaaaaaaaaagtaaaagaggtaagaaaaagaactatagactacagaattagaaataaatgaagttttgggtttatgaggaaatagtatacagtatactttaagagtaaatggaagtgataacactgtagtatattaaaaactgtgggatataccaaaagtctaattaaaggatttttcctccttagaaacataaactgtaaaacaaggaatagaagataaaaatatatgaactatgttttcatatatcctaattaaaaaaccaagcaaacctaatgacacatggaaggacttaataaaataaaaacaatgtacaatatactttatcaacaataccaacagatatttaagaaaaaggtgagcctagcagatcaaagtaagaaaaaatagagattgacatttaacattaggaataatgagacaaaaaaaaccccacaaagctattgagcttcatattgataaatctgaaaatctaagtaaaacaagtaattttaaggcaattatagttaccagtgctgtctcaagaagaaatataagtctaaacagagaaaaaaataagatgataaaagaaactttaaaaataaccatatagccctcaaagagaagtagcatctcatcttttataatttattccagaaaataaaaaatatggaaaattactctttttctcttactaggaatccataactgaccctaagcaatgtgagaaaacatgaaaatgaaactctaggtcagtctctttttcaaatatgaataaaggaatcctccatgagaaattaacaataagacttagtaatgcatttaaaaaatagtacttcctgaccaagtagggtttatctcaatattgaaaggttagtttacttttagaatttatcagtaaatgtgtcatattggcatattaaaaaagaaaatgggattatatataaggatgatgttactagttataaaaagagagggaggccaggcatggtggctcacgcctgtaaccccaacactttcggaggccaagcagggtggattgtttgagctcaggagtttgagatcggcctggccaatatggcaaaaccttgtctctactaaaaatacaaaaaatagctgggcatggtgatgcatgcctgtagtcccagctacttgggaggctgaggcatgaggctctctggagcccaggaggcggaggttgcagtgagccaagatcgtgtcactgcactccagactaggtgacagagtgagaacctgtatcaaaaaaaaaaaaaaaaaaaaaagagagagagagggagaaacctatgaaatttaacaaccatttctgctaaaatctctcagtaaacacagaatagataggaacttccctaacttgataaagtgtatctaccagaaacctatagcaacctgcatatgaaagagggatttaaaaaatttccatcaaagtctcagaacaagcagagaaggactattctacattcccttggatgtgctagccaaagcaatgagatatacaacaacaacacagagcgcaataaagattggggtaaattcagcattatttgcagtcaatattatgacttagaccaggagtaggcaaactttttctgttaaggagcagataataagtattttagggattgtaggccagaagacatctgtgacaattactcagttttgccctaataacataacagaactaagatccattatatctgtagtaaaatatataaatatgcttaattcatgtattttaaagattttcagagtgaattataaggcaaaacctaatgctctgtgttgtggaagagaaacagaaacaaactgactcaggaaagttaaaataaaaggatggacaaatgtgaataaaaagaaagcaggtgttgtagtcgttatagtgttttacaaggtagaattcaagcagaacagtaaatgaggcaaagaaagatgcctggtactgaaggttgaaattcatattagaaataactattacgaatagctatatagcaaaataaagtgccaatattcatgatggaaaaatcataggctatgaaaggagaaattgaaaaatatactagtcttaggggattctccttcacctgtctcatttactgacagattaagtggggaaaaaataaggatatgaaagacaaaaatagcaaaattattaaggtagatttgattaaaacatatcaaactctgtaccctaacaatataggatatgcttcttttcaagtcaacataaacactcattgttattccagttagtacggctgtgtaacaaattaccctcaaatttaattctatgaaagaatgacttattatattcagattctgtgggtcaggtatttcaagaaaggatagtaggaatggcttatctctgtaatgcctggggcctcaataaaagacttgaagcctgggagctagaattatcagaagattcatatgttcatgtttggttgttgatgctggctgttggctaagggcccccctttccctgcatgtgggcctctccatgtggtttccttttgttggctcatttgggcttttcatagcctagtagcagagttctaagggtgagagtcccaagagacaggaagacccaggcagaaataatagaatcttttatgacctcagaagtcatacagcattactttggccatattctgttcattacggtagttacaaaagtcctgctgctcatgttcaagggaagggcaaatagactctgcctgttcatggggagtggcaaaattctggaagagcatgtgggaccagaagtattgctctgactgattttggcaaatacagtattccccggtaatatactgactggatcacaaacaaaatttcaataaatttcagtagatagaggtagtacaataacactgagatcataatataataaaaccagaaataacaaaattagattgcaaaaaagccctctacccagaaattttctagtactcttacatttcaagtcagagataacatatatggttaagaattcctgggggattaaaaacaaacaaaaaaaagataacatataagcctaaactgtagaatagctagagaagtatattaatgaaaccattacctatgagaatgtatagatagatttaagataattattagaggaaaatagatagcttgaagtacatatattaacttgaaaaaataagcaaaaattgtaaaagatatattaagcatctgactcaaaaacaatatcagcctcataaatcaaaggaaagtggaagggaggaagttttaaagttaaaaataaatattaataagatagaatacaaaaagtataatagaccaaaagttaatttttttgaaaaactaaattattaactatcccaatcaaggaaaaataaagaaaatgcaaatatacaaaataaaaaaataaaaagccatagaaacaagagaaaactaaaataatcctaagaagaaactgtgtttaattctgtgcaaatatctgaaaatctacatcaagtggataattttgtaggaaaatataatttcccaaagctgaccccagaagagatagaagattgaaacagtttgatttccacaggcaaaataaagttcataaagacctatcacttctcccacaaaaacaccaagtccaggtggttttacaaggaaattttaccaaacattagaagagtagatacttatagtattctgctaaatgtttaacaaccgggtctgggggctggagcagggagtaaaaaaaaccctgatctgtactgtttgctgatttctaagcataaatatttctgtcataatttatttcaagctacctgtgtgacatcacttaaagtgaagatgagaagagatgtgcagataggctgttgtgagtcagtacaagctggcttttgcataacatggagctgatcccaatgctatttaaactgttgcagggtatggaagtactactttactcttacagaagtatatttacagagtgaagaagtacttccaaatttcttttgtgaagtacataaggcctttacagaaacactgataagggctttatagaaacactgataaggattacagagaaaataactgcatactcactccaatgttaactataggtgcaaaaatgctaattgaaagaattacaaacagaatctagcagcataaaagcagagtaaaacatcatgtccaagtaacatttattccaagtattcaatgaaatttcaatattaggatactcatttatttactttttttagtagatctgatgatgaaacccataattatatggatgccaaaaaggctttggccaaaaattttatagccattcttgataaaaagcattcaaaaatagatgtgtacttccttaatatgaaaaaacacatccatctcagtccaaaagccaacatcaaacttagaggcgttcctgtgaaagtaaggacaaaacaagatatctgttactacctattatttaatgttttactagaaatactaaccaaagcaattagatatgagaagagattacaggcatcaaagtggaaagcctattataaaagtttcatgtttacaggtgattttttttttttttttttttgtgagatggaatcttgctctgttgcctgggctggagtgcagtggtatgatcttggctcacctcaacctcagcctcccaggttcaagaaattcccctgcctcagtctcctgagtagctgggattacagacccgtgccaccacgcctggctaattttttttggtatttttagtagagatgaggtttcaccatgttggccaagctggtcttgaactcctgacctcaggcaatccaccctcctcagcctcccaaagtgctgggattatagatgtgagccactgcacctggccaggtgatttttgcacttggaatttaagggaaacaactaaaaatctaaaaaaataattcagtgagaaagtaaaatatacagtgaatatgcaaaatctttagactttttatattgaaatgaaagcctgttagtattttgaatgaaaaacttcatttacaaaagcaacataaaagataataaattgggaatattataatcaaacattaacaaaaatatacaatatctccaagaaaaaaaacccacaaaaaccttctagaagggtgtgcacaagaattcttgacattaagaacagacattcgtattatttttaaggaaaactcaagatcataaatatgtcatttacctctttgtaaatttataaattcattatgaaatcatgtaacaaagctttttttcttccgttttaaactagaaaaactgaatctaaaggtcatgtggaaaatatgcaaagataatagctgggattatttttaaaaagaattataatgagggaaaatcagccctattggatatcaaatatattatggaatgttaataattaaaacaatgtggtactggcacaggactccccagaataatggaatagaataggtagtctagaactagactcagttacatgtagaaatttgtatatggtaaagtagtatcttaaataggtagggaaaagatgggccattcagtataagtttgggggacatataataggtatttggaaaaaaatttagatacataccttacaccttacagcaggatacgttgcaaatggattaaaattttaagtgaaaaaaaaaaagaaatcatacaagtactgaaaaaaaagcataagataactcataattcagaaacccagatataaaaagcaaaaatggacaaatttgactttattagaaatactcttgattttatttaaaaaaaaccttttacacaggaacacaaaaccttttttttttttttttttttttttgagacggagtctcgctctgtcgcccaggctggagtgcagtggcgcgatctcggctcgctgcaagctccgcctcccgggttcacgccattctcctgcctcagcctcccgagtagctgggactacaggcgcccgctaccacgcccggctaattttttgtatttttttttttagtagagacggggtttcaccttgttagccaggatggtctcgatctcctgacctcgtgatccgcccgcctcggcctcccaaagtgctgggattacaggcgtgagccaccgcgcccggcccacaaaaccttttaagcaaagtcaaaaatgaatattgaacttaaaaaattatttggcaattgtattacagaccatgataaatttagatatatatttattttatatatatttataaatttatatatataaataaaagggaataaaacaaggtgtagaatagtatgtatattatactgctacttatgcataaaaggtgggacaataagaatctatatttatgaaaaaactctgaaagatgcatgataatagtgacaatttatggatgggaaacctaggcatggaaaaagagtatggtggggaaaagacttaaccttacacgtgcatttactttaaagctttggaccatgttcaagaataaacaaattgaattttcaaagagcaaaataaaattcatactgccaataacctaacaattacacatggctaaagggaaatacacagaatgatattcattgaagcatttttctagtagtaaaatacatacaaaaattatatgtctgtcaggaaagaaatgattaaaatatggtaaatttgtaatattgaaggctatgcagcacttaaaaaaggttaaggtaagcaaaatactaatataacagaaagatctccaagacatatttttgagcaaaaacatgtttgagtgcaaaagatttgtatggtgttggcagaacttatttatttaagagtacagtgctatacacctttttgtgtttaaaagcacaaaagtatacacacatgcagacacacacagaaatctataaataattggaaatagttttgaaagtgtagacacaaaactcctaacaatagttacttctacgagaggactttgtttggagtggaagagagtggaagagggtgaaaaaggacttcagatttttcagtattggagtttttattaaaatatgctaatattttactcatgcaataataataataaaaagtctcaaagaaggtgataactttgggtgatttataactgttttggagactttgcaaatttgtttccccaaggccaagtgataaattgtttctgtgaaaacatcccttttcttcttcagatttaaatattccagtgttgagaatccacagtaaacttgctgtactctgtcactgttgaggaatgggacattcacatgaatcaaatatgctggtaaataaagaaatatggagaaaaatatagaggtacgtgcatatattgtatggcttataatctactgagaatggagaggaagacatcagcattaaaaatattctttattgagtgaattctttagatccaggcactgtactggaatctttacatatgtttgtgatctcatttaatccgggaaacatctcataaagttggatattatccccattttatatatgaggaaattgaagcttagaaagatatttccttgtttacccaaggtcccagtgctaataagtgtcctccatgagacgcaaaaccaggtttctctaacacctgaagcctgtgttctttcctctgttccattctgccccctccccaatacaatacacaacaatacaactacactgaatacattttaatgtttcttgatgattaggagagcacttctggcttttttgaatgttttggaatccctttatgagcgtcaattatcagaatactagtgaagcatggaaataatgtctaattggagatatctggttaaaagaaagcagagtaatactgcatcgacagaatttagtgcttttattacagatagataaaggtatggcaaaatcactggtgtgattcttgcatatcccctttattaattgatctgcatgttctgaaggccgttattccctatatactgattccaaatgttctgtctttattagtccttttatataaaaccttgtatctctatttgtcatcctaaaaatattgcttaaatacatgatgcagcttctctccacattggaatctgataacgaaaggtcttatctctgtagcctgaattaacatgagcagaatttaggtatactacgccaatagcttcatggacagtccctttggttatagattataaatgccatttagagaaagcacaggatggctcctgagtgtctagtaaacttcaacaaccacctgagagatacctccgtgtgactgcatgaaatggaaataaagaatggcaaataacccattgactatgcactttctcacccgctgagagcaaaacataatccgatgcaattttagtacttacatgcctctggggaaaatagacccctaaaaatcaccgagtgcagcactggaaaaattccttaaatttgtgctatgcttggtgttataaaacccaaggaaccttagatgttcttcttgagtaaaatggactggtaattttgttttgttatattatccaccaagcataatgataatgggtcacatgcaatttaagaaaaaattaagtctaataagaaaaatctctaataaatactaacagcatcttattggtatcatcattggtttaacccttctattaacatttgtttttttacatattaaatgatctgtaatatgttgaaaatgaagaggatagtaaaaattaaaacaggcattctaataatatatgcattgtacaaatgtttgcatgcttcttccctcaggcgagtactaggaggtgtggtacatgcatgggagtggtgctaggatagagcaggagattttgattttagatatgctgagcagtgaagatgctcagtgcaggggatagaccccatcattaaccaggaatgcaaccaattcaatgaaaaacagagattagaaatcaaaatgtagccccgaggaaagtacacagttatcccctcaaatcaggcttcttctgggccactgagaaagggtgaacgatcttagggaacctctggtacccaagcaaagggcctgggggctcctgtgcattgatagctatccatcacgggcaatgtggtagagtggggtagagctagaaggatgtattcaggaagctgccattattagaaatgtgcttctcaagcctacataagaatctcctagggaacaaccataaagtaaaagtgcttaagcacgtatttccaaggattctaattcaagggaactgggtaacaccctggcatctactgtttttaatgagttgttctggtaacacctctgcatgtaaacatgtgaagacgattgcattaaatgatattgacaaggagtctctttcccctagtcctttccaccatgtggtttaggagaatagcaactatttccaaaccctactgaatagtggcagccacaaatgtcttgccatgtcaggctctcaatggtttctgagaaagattgaacagccttcaggaggctaatctatgattaggtatttgctatgcaagacactgtacatgtgtagaaatggcaaaggtccctgcctcaaggaacttacagtttaggaggacctagcagacagaaactcagacaaataaatgcagcaaactgtgacatttgctgtgaaaagccatttgtattggataatggggacaaatggggtttggtcattagctgaagggttgcctaggtcagcataaggcttgcacaaaggagtggcagatgaggacatcacaggagccgtgttgaggaggtcaaatacttgggtagtagccacatgttggttgtaaatgtgtgtaggagggaagagcatgaaataactcccaggtttttctggcatgagtgtctttgtggcaggtgaagccattgtgaggatcagcatttggaagaactggatttgaagagaatgttgaatatgaagtattcatagtctgtaaatggagatgttctaatttgtgggtcagcaaacttttatcacaaatggccacatagtaggcattttaggcattgcaggtcagtctttgccatgaccactcaactctagcattctagtgtgcaggtagtcataggcaatatggaagccaatggggttggctgtgttccaataagactatttagaaaaacaggcagtgggccagatttggcccatgggagctagcttgccactcctgctatatgtataggtatgatctgaagataaaaatataaatgtagctatgttgactcacatacatacatatatatattatatatatttacctagtatctttctatgtagacttataatcatacctatttgatataaacgctgcacttcctggttatttgggataaacagttttttcaaactatccaaaagtcacctaataattgtctataaagaaacaattaaatatgaaaatataaattaaaacaacaaaatacattttgtactcagtggttcagcaaaatttaaaaatctggtgataccaagtgttaccaaggttgtagagcaacaaaaactgaaaagctatttcaatgggagttgtgaattaatgtatctctattggaaaacaattgattattttctagtgaatttgaatatatatgccaatcctaagttccagaaatctcactcctgggactctaccacaggaaaaactattatacatgctcagatcaatatgaactatactcatagcataacaaaacaaaaaaacagaagccggaaacaacccaaaatgattcattaaataaagtgaaataacattcaatatggacaaatctaaaaatcaaaagaaaaagaaaccgactgaatgataccatataatatcctttatataaagcttgaaagtgccaaacaaaacactgttgtaaaagggtccttacatttttggcaaaactaggatgaaaaccatgaaaatgaaaaactcaaaatgcaggtaggtggaggcaaaaaacaaaaaaaaaaataaataaattctgacctgataggaacgaccaatgggatttatttatttctaagcttggtaatgggtagacagatatttttaaaatgatagctcttattattttacatatgttatatttgttccttaacatcaagcaagtcttgcatgataatgaaaaggcaaaaccaaaatcttattaagttatcaattttatattttcaaaaaataattaagtcaagtttattcttttgttcaaaagaaacgttcattatggggaccgattttttttttttttggtctggctctgtttctttccagtcatgtcacctctccccatgacagagggtcagctggcttccagtgtttcagctaggcaggagtcggggattatggatagcatagaagagggaggaatatcaggaaggagctaacgttgctggtgtagggtcatttgagttcctgtatctctaggagaacaagcattgtctttggcataggacagaatgtggtcagaatcctctctgtcactcagaaagtaattccattgctgtcttaatattatcctagtcatctggggttgcaggaacactgtgtagtggttttgcggtgtggaagctattgctacataattttttatttcttgaatatcactttgtagtgtcatgattacaaggcttggaagaagataaactctctgtccattccgagtataaatgggcacttgagatgaaaccacctcgttaatttccccttgttgctgaagtagaatctgaatccaaaccacaacacaacctagcccctaaatctctattaaaaaccaccttgggtagtctggcaaagctttatttaaagtcagcagagaattataaagtcaaacgtgaaaaatggtacaacaagaaagaatcataaaaaaatactagatcagttaaatgtagtcaaaggcaatttagtgtgttctggcaccagcacttattgatgcaaagaatgtgatatgtcaggggttggcaagagcatgtaggaaatgcagaatgaaggatgcagctccacgcattgactccgaaacagccatacatggctgcagaggatgcttcagctaccttccttgcttttctatcaggaatttcagggagaatattcgaattcccctaggatggacattttctgttcttttgttcttgatatagtttatgttttaaagtagaattctttctttcatggagataagctaacatggagactgtgtaaattgggtcagaccaggagggtaagtaaaacttgctggtacttctgagtatcctactattctagtttctctggggctgctacatttatctgcttttttacatccatctccaagctgtgagggtttctgcctcatcttcttcacccctttggtttcccattcaccaatattagcagatttgctcagtaatgaacacagctaccaatgttatgcacccacccctttccaggcactgtgctaggccctgcatatacattctctcactaatcctcaacaagccccggtgattcttagaactctagtctgaaaaaaaaaaaaagcccctgtgagataggtcttatcagcatgttgattttacacataaggacaactagggctaagagacttagagctcatttgaggtgccacagaaacagaactcactaggccggactcctgtataggagcaggcgctatgtaagaagtgttggttctctaacttcatcaacagtaaaaggtgggtgccagtacctctaggggacagagtacaggatagtatagtgtcaagagcatcaggctgaagtctgggtttgaatcctggctttgccacttattgactctgtgactctggagaaggtacttgaccactctgcatctccctctccataaaatagggacaataataacacctgccttactaaggttgttgtgaggattatgtaagttgctatgaatagtttcaaatagttactgtggaagtgctgaatggtagtccccttacctctaggggatgcattcaagatcccagtggatgcctgaaaccatggagagtactgaaccctatgtatactgtattatttttttgtgtgtacatttataactgtggtaaagtttagtataattattaggcatggtaagagataacgataactgataataaaatagaacaattataagaatattccagcatcactacgcttgcactttggggccattattaagtaaaatagggttacttcaacacaaccactgccataccacaacagccaatccaatagctgagacagcttctaggtgactaagcggccgattctatatacagaatggacacactggacatagcgatgactcacatcctgggcaggatggaacaggatggtgtgagattttatcatgctactcagaatggcatgcaatttcaaacttatggattgttgatttctggaattttctattcaatattttcagactctagttgactgtgggtaactaaaaccatgcagaaagtggataaggagggactactgtatacatattgttgctgctgctgtttctattattattattatcaatagtgttgttatttttgtcttaaaaaatatatccctgaaagtagagtgccttcactgaaagaagtggttgtggatggaatcagggacaggggaggtggaaggaccagcccctgtggcaggtcagatgggaggatgttcttagacatgccactcggtacccttgaaatcctactttggtgtgggccatatccacttttggtaaactcatttgccccaaatgaagcagcttttgaagatcaaacaagaaaactggattctttgagtatatccagcttgagtacttccatgttcaaaatgcctttctttcctgtctacagattcacctctaggagagaaggaaagaagtttggagacttcctttggttctagcaggtcttatcagagtctcagtgtagactgaagaggagtgattgctatactgtaaatgctttagagggtctgaaagagattagagaaacctattccagaggataaaggcaggacaagagggagccattaatctcatggacattacattccctaagaactttttttgggaatggccagaagcatgccaggccatgtgctgtccatttgcaattctctgagctgtggagttgtgtgtgtgtgtgtgtgtgtgtgtgtgtgtgagatagattgaggccaatgtcattgcctcatttacaatggttcttaaacttgaactgaaaggttgacacatgcatgcagagtcaatgcagattattcgactgaagtagtcctgacaaataccagggctctccacattgtcaggaacagtctgatgatgacacgttcgaagctccgcagactggcttgcatcttagtaaatgtgtacaatcaggggagacatagctatgccgtggagagttctgagatgtgaagagaacaagttaattgttcagcctcaactgagacctttcactcaagtcattaatcacagtgcacagtctggagtcttggctctgaagttcgattctttaggctgctttcctgctccagatgaaagctcattccaggtgctggccatttgtgttttcctccaactaggctgatttatggacctggagatgttttctggtttttccaaattctgttccattactttgtaataaggggggacatgtgatttctggctttttgcagatcctcagttttaacatccctaataccaaagatttttaaaattagtctgtggtctgctttctgtgatctggagaatagaaatgctgttctgtattttgagtatcaaagttaagactttagggactcatttctttccccttgagctggagttgaagttgcaagggatgggcaggaaactgtgttcctgccttcaacatcccaatgcaaattaaggcttgggaagccctagtgacagcaactgactgcaggtgttggagatatccccgtcccacccgaatacatatggctcagggtataatattaaaggacttccacacttgggctaggtctctggtgacagtgtaagccaatattgaagatttcaaaggagaatctgagtgtcaaaggaggacattgtgatatggaggctgaacagggtgctgccaagtgttagctgtttgactgaaaggtaaaccagatctgagttgatatggggcaacagatcccttgggagttttcccaggaggatagaaatgtgtcacagcaaagtaattggaaattgatatttggcatatctctgggttactttttattccagataataccaagagtcacttggtattggccaagagtcattagtgacttatacatcaaatcccataacccattgctgaaatacaatcttctgttcgttgacagtagccagctgcttcctggtcctctgcttcctaactagtactttatgttaaaggcccatggccctgatttaggtgaaatgagtggtaaaaatagcaattcaatcttataaaaaacctgtctatacttttaaaaaattgatatataatcattgtacatatctatgcggtgcatgtggtattttgatacacgcatataatgtgtaattattaaaccagggtatttgtgatatttatcacctccaacatttatcatttctgcgtgttaggaacatttcaaatcttctagctgttttgagatataaaataaattatttttaactatagtcataattgtgctgtcgaacatgatgtcttctatctaactaaatgtttgtgcccgtaaccagcctctcttcatccccctgcactgcaccaattctaccttttgataattctctgaaacgaaattttcactggcagtgctgtccttcaaattcaactcaactcaacaggtacttgttcagagcctcctatgggctttatattgtgttgtgtgccctgggacctataaaataagtatcaaacatgacctttgcccttgaaaagcttatgagctcataggaaggatgatgtgtttatgaaacacattttacatggcaagataagctatcgtgtatgtgccaaagtgactagaatcgggaataagtgcaacagagagtcagaaaaatgagagtaggttgtactggaactgtcagagaagctcttatggatgaggtgggacaaagacacaaatatcctaaacccagaactctccgttaaagaaattgtaagaagcacagcatcaggttaccaagaaattatggagcccttttaagtgaaagtaatttgttcaatatgagaatggattaatttagttccataaatatttattgagtacatgcaatgtgccaacaactatacctgatgtgatcaaggaagaataatgagtacaaaggacacgtgtgtgttattctcagatgctaacttctctcacataggtatttaaagttattgctggtctgttgattccaaagtctgtgatttttatcatttaccattcaacctctcaaaaagactttgtcatccaagatatatttggttgaggggctgagtctaattttttgtgtggtggaaaaatggcatgtctaactgcataagttgtatgaagtgtaaagagttgcatgcatgccgattgtgaaagaaagggacgttgaattagcattgaatgtgggcccaaattattgggttagggagtatttggagtagcattagaaaagcctgaacctggcccacattcagggctataagtgaagcccaagttctctatagatcaagcttttcttggaacttgtattgttccccttgacagctgatttggaaacccaattagaagggcctcccatcattagaggtgaggcagtcttgcactgagctttgttatttgagaagtttaaaattggctacacccagatatattggataactcactaaaatctagaattgatctgtattcctccttgtaaaataaggaaagccattatgtgttcatttctttgaggacaggtataactggacaattgcaaagtgttttagaaagaaaacaatgtcaggatgatagtggtggtagtggtcatcgtcatggagatggtagttattattccaaatatccagataattttaaaataatataaccatagaacgctagtaaatgctagaaagaatctaagatatcaggcatggaggcacagaggtgtcaaagtttatttagcgaagcaataccagaagagaactagaaaatcctgcttcctagctggctgtcatttgcatacaacaatgagacccctgcttagtaacccctgtgtttctgccacccatgtgactgctttctgaagctaatttagttatcaaataaaaaatggaattttgagaaaaccgtatttttttttaaactggagggattggtggaaggaaaagcaagaagaaatttggaatcttggttcctgacattttccttaatgttcaattactctcttcattggaaagcttcgtcttggcctctatgggtgacacatccacttgtggtcactcactcctatgtatgcgtgtacatctgttgatatgcattcctcttcatcatctgtaggcattttacaaataatggcttgtgtgtgcgtgtgttttttatcatcttatgtttttaaatgaaaatgacaacttgaaaattctttgcagaaataattcttctatggtaaaggaatttcagcgtgtcttccagggtcatctttgggtcacataatttcatggaggagttggcagtgggtgggagggatataaacaatgactttggaatttttatctttccatcctgtggcaggtgggcaatgttggtaacaaagaaagttggttggtggagaactaggaaaatatagtcaaataagaaaggtacaacaagatgtgagtgcaaaccaaaaaattggcaagtgcaaaacaaaaaattggcaaggcatagaaagagagaagaggaggcatggatacttttcccctctcttccaaccctgctcctctgtgaagccattgctgaggtgggggtgcgatcaggagagtatataaaggagcttggactttgcagttgtaactcttgtttttgatgaaactgttttggaagctttcttcttgaatagagctgggggatctgagtgggactcagaagagaggagaaaggccatttggaactcgatccagattctgggtttaaagatgagaaagtattacagggtttccataaaccacggagttcaggttggcagcatggaaatctgatccagtttttactcaccaaactatgtgtgtggaggtacacatcagaggggtacctttttcatatttatccaaagcactgtgtagaagagactagtccctggatgggggaattttaaacttccttctaagttttccaatcctatctgcatatttttagagccggagtttctaagcaaggcactctatattgtttgttctcttgggtagttaagcacagacagcagggaagcatggtggctcacagagtgaactagctgcagagaccaacttatccaatgaacaaagtaggtgtaaaatgaaaatgactaaaggggtccttgatttcactctcttgagaagtcagccacaaagccaagtgcctagagacccacatttccagcttctctcgtctccagtctccctttaggaaggctgtgagcaaacctggccttcgtggttctttcttccgtctgtaaactccctgtaattattatgcagttccttatgctaggtaccatgggactgtgaggcctccggaagaaactcttgactttgaggagcttggaggccattgtgaaaacaggaaagacaagcacaatcctggtaaatgaagtgtgtacaaagcctgtttgacaacaaagtcctctctagaggaccttgaaaaatcagagaccgccatcccatatggagaggtccttccaccctcacctcaggggctgtttttctctcactgaagaatgaaaatggtaaatggcctcaagcaagctaaaagcagatccctcagctttattcatttcctgactgcaatacttggtggtagtattagaaaaggctctggcagtcctcgtaggagaaatgccagtaatgaggcaatggaacgttcattcacctgctttatgttcttttggaaataacatgatttataaaagaatacagaatcataattgtcagccaagatgtcattttaaccttaggatgtccagaaacaaagggatattacatcctttgttcttggagcaccactggtgtcaaattatgcacagcgtttcctcttggcattaagtgcttgtgagcctaacagcaaccaaacactgacttcagaaagatgatgtttctgatggttttctcacctgaatatctccttggtactatgggagagagcatgggcctcctagcttccctgcattctgatagagcaggagccaggaggcatggcagtcttagaaatggctaagggttggggtacactgtctttggcctctatcagaggagctgaacaagagtcccattaaaatgctggtgaaataattcataaccttgattttatctgcacatcaacatatgccaacagatgctcagtgcaaaacatgaatatttgattaatataaaatcaggcatctagagcagagagcgtggaatgttgggggttgagtaggacttacatgttatccatctaatcgcagctgtctggatgcacatagtaggcattggaaatatccataattatattttcattgatttgaataactctgttgcttggttttgagcccagatgtttggcgtcccgctggaactgtgtgctctgcctcctgtcatcagtctcatcagcacacagatgttcggcaagggacagcattcctctagtcttcattgtgaggcctcttctctgttctcccagcccatccactagggctcctgtgacagtcagccacagaacacagtgcaggtcacccatggagctaggtgcagaaactgtccaccacaccattttgtcattgtggttttatccaaaggcagagaacattggagcctcagctaacagaccagactaatgctggtaacaagtacttgagtggttatttcatcattcattccattggtcattgaaaaaatattgagtaaaggcttattagtccacagcacttccctgaaacctgaagaagacataggagaagacccttggtaggagatggagaaggttgcactgtgagtgagaatatgagacattcattaacttctagggaatgataagactggttacattagtgctgatgacattcacagcagaggggaggggaagctagttggtagagtggatagatagtacactagatccaagtctgtatcttgaatctctctcataacaccagcgtgtggctgtaaacccaggcctccggtttcctctgtaaaataaaggagatgcactaagatgctttctatgcctttcagtactatccttcagtttgctctgatcaagaattgaagagatccccatattcccgtggtttaattttccctgaagaccttggactgaccactttcgtaagtaatcaggtagacttctaatagtcaaaggacacatgaatgaaaggtagtgaaagaaggcatacactgatgccttaatatcttggttagaatagcggcttttgaaagtctatgaaaatcaattttggataataatagaaaaattcgttaaggctgggagtagagctttgcttcaaagtgaaatagcagcaagttttacctttgctcatgtaccatcattcttgaattagttattaatctcaggaccaagagcaacttgttgcccttggatcggtccagtggcatttctttttcttttgtttttttttatttttttgagacgcagtttcgctcttgttgcccaggctggagtgcaatcacacgatcttggctcatcgcaacctcccgggttcaagtgattctcctgcctcagcctcctgagtagctgggattacaggcatgtgctaccatgcctagctaattttgtatttttaggagagacggggtttctccatgttggtcaggctggtcttgaactcctgacctcaggtggtctgcctgcctcggcctcccaaagtgctgggattacaggtgtgagccaccatgcccagccctagtggcatttctgacttccttggttcacatggtcttggtatgacagccctatgaatgggtacctgaggagctctgctgccagtgttcaaggtggcttctctttagctcatctaagatacaggggctatatctttaaaaagtagagacaggatgattaatctgtagttggacagattaattgtggcttccaatctcttcagaccctgtgtaggcagatcaagtaacttacctacataaaaggcaaagcacagaagtcatgaacattctcacttctgtgtagtactatatagcttcctgaaaggtttataacaatttctaaccaacttgtttaatccccacagttctgtgaagtcagtattatattcttacattgtaagtgaggatattgaggtacaaatgtatttgtggggttggaaatttctcacaggacatatttggtggatgctgggaagagctactctcctgaaactccaaaaccccctccctccctcacctgctacagttgaactttttctgtaagttaagacatttctgattctgggtactcttttaaaatgcagatacccctggaagagaggtcagaccaaatttcttattgcttaaataattgcctgaataatgttttacaatcattttcatctaagatagttgaggacagcatgctaacatattaaaatcaggattaaatgggctgggtgtggtggcttatgcctgtaatctgagcactttgggaggctgaggcaggtggatcgctggacgtcaggagttcaagaccagcctgggcaacaaggtgaaaccccgtctctactgaaaatataaaaattagttggatgctgtgttgtgtgcctgtagtcccagctactcaggaggctgaggcaggagagctgcttgagcctgggaggcggtggttgcagtgagtcgagattgcaccattgcactccagcctggatgacagagcgagactgtctcaaaaaaaaaaaagaaaagaaaaatcaggattaaatgaagggggaccaggatagatttgggtttggggagcttgtttaggagtagctatctgataggggtataacaatggtgaccccaggactccagttctgaatgaaggaagtccccatctaagggatagtatgggacacggagcaagaagataatggaaacagagcaactctttatatttcagacttggttggcttatttgtgctggatcgacccctggtgagtgggcaggattgtgatggatggggtcaagcttatctaccattacatgccaagtacctggcttagggcattgatccattttatatactctcttattttgctaactacttaaggcagaaaaatcattcccctattctactccaatatgtgccagttgaaagtgaaatcctcacactgagcaaatgcaccaaagaacactatataaacttaatgagggagatgaagagatatgtgccagaaacctagaaaatttaacactgatgaggttatgactattatatgtttagttaaattgttgacactgacaggacgtggctgaggaaatctaccatccattttctccttgtaccagtgataatggttccttggtgtgctcttctcagttaacaaaaatattcccaaaagttaaatgcagggagaagaagtgacataagaagtacttttattatctctgttcttctgggagttccctccagaaacattatttaaagcagtacttctcccgactggcaaatgagtttgaagggaaggactcacgagttcagaggggaccggagaggctcctaaccctgtgcttgaaggcttgctccagcaaacccacataacacgacactgccatagcctctcaaaaacacctttctcttccattttcttcctttcaaaaactgacaaaggttatccacgggctagtgaataaaatctcaattcctttagctgacattcaaggcacaaatgtgatcgtgatttttgtaaggtgtcaagtgctgtataaacaggtggtggagagagtattgaatttgaagtcagaacactttggtttcaatcttgttaactgggtgaccttgggccagtcacttgatcactctgaatctcagttccttcacttataaaataggattatttcaatagttaaattaattgaaagtaacatagtacttagcaaagagtgaacattcaatacccattaaggaagagatggttaccagaggcaatttattctagcatttaagaacattcactatggagacaaaaattagtaatcttttttatttatttatttttgttttagattcagggggtacatgtgcttgtttgtacccccctggtggggttgggcttcaaatgtacctatcatccaaatattgaacattgcacccaaaggttaatttttcaacccttaccctccttccaccctcccgccttttagagcaatctttcttttgtctttgatttctacctagaaaatgggggtaagttggaagacttagatgagttaatacatatcaggaactttcaatagtgcttggcctatattgatccttctataagtattaagtcttttcttgctactgttgttgcttttattgaatgacctgtcctaatcttatttttcctgacttatctgattttctattttaccagcagacagagctcctccacaaagtcatgatatcattagggtggggattaattcctacctttaacttccatgagctttactcaatgcctgcaaaatactcaatcatttttgttattaaaaagtgtacaaatgtgcttgctaacatcgacctagcattgtgctagaggtttcagcctgtggagtaaggaaagaaagaaagaaagaaagaaagaaagaaagaaagaaagaaagaaagaaagaaagaaaggagggagggagggagggagggagggagggagggaaggaagagaaagaaagaaagaaagaaagaaagaaagaaagaaagaaggaaggaaggaaggaaggaaaggaaggaaggaaggaaggaagggaggaagggaggaaggaaaaagaaaagaaaagaaaagaaaaaagaagcatccagattggaaaggaagaagtaaaactgtctttatttgcagatgaaattatcatctctatagaaaattcagtggaatgtacataaagctgttagaagcaacaggagaatttagcaagttacgggatgcaagattaatatgcaagtcaattgttttagttccttaaacttaagacagccacaagtagaccagtttaactggagcataggatgagtgaggggtagtgtggtatgtaaaattagaaaggcagatctagataacatggaatacttttgcttactctttctctgccttccttcattccttttcccctcccccacctcctttctttctttttcctttctagtttcttggtataacaacctttttccataaaagaagggtagaacttctttcttaaaggcgaagttatttattctttgggttaagtcaaacaaaatgaccgtaactacgttgttttgagcttacagttaatgttctgttatatataaaatgttcccaaagacaaggagtgaaatgtcagcaagcaatcactggaacatagggtatcaggattcaagttctgatttcctcttaactagctctaataactttgggaagatcacttcaccttttaaggcccagtttgctttgtcttaaaaaagggataatgattgcatgatttccatatttatagggttgttgatggcttactccaacaaaatttttctagttcttagaaactctaagagctggagatagggaatcactcccctcagggaatatttagtgaaaatatgtgtagaactaactccagtggcataggataggctattcagagtagtatacataagggcctaggagagtgcaaagaagggattaattaactctgcttgtggggttgggaaaaatttcgctgagttgatatctaaagccaagctcacagcttaagtgagatttttgacagagaaagggacaactttaacatgataatgggaataatatcttttgtttgtttagcactttaccattttacttgacataaattagagtgatctaaaaactatatggacgttagggattattattgctatcctaggggtggttattactttaaactacttgtttgataaggctggggaaattttgaccccaaattgtaacaatttagaaaagtttatgtaaaatttccagggaatttttccatgttgggggaaccaggagccttaggagcttggtggggtgtcaaggattaggggaggggcatgggaagagggaaaaaggatattaattaaatctttgcaaaaagatggctcattttgtaattatggcataacttgctgagtaaagatgcaataatatgaaaacctggatgtttaacttttttccccataagttattggggtacaggtggtatttggtacatgagtaagtcctttagtggtgatttgtgagattttggtgcacccatcacccatgtatacactgcaccacatttgtagtcttttatccctcaccctcctcccatccttccccccaagtccccaaagtccattgtattattcttatacctttgcatcttcatagcttagctcccgtatatcagtgagaacatacaatgtttggttttccattcctgagttacatcacttagaataatagtctccaatctcatccaggtcactgcaaatgctgttaattcattcctttttatggctgcatagtattccatcgtatatatatacacacacacacacatatatatatatatatatatatacacacacacacatacacaccacagtttctttatccactcattgactggtggacttttgggttggttccacaattttgaaattgtgaattgtgctcctgtaaacatgcatgtgcatgtcttcaaataatgacttcttttcctgtggctagatacccagtagtggggttgctggatcaaatggtagttctacttttagttctttaaggaatctccacactgtttttcatagtggctgtactagtttacatttccacccgcagtgtagaagtgttccctgttcactgcatccattccaacatctactgttttttgatttttttattatggccattcttgcaaaagtaaggtggtattgcattgtggttttgatttgcatctccctaatcattagtaatgttgagcatttgttcatatgtttgttggccatttgtatatcttcttttgagacttgtctatttatgtccttagcccactttttgcttggattgtttttttcttactgatttgtttgagttcgttgtagattctggatattagtcctttgtcagatgtatagattgtgaagattttctcccgctctgcgggttgtctgtttactctgctgactgttccttttgctgtgcaaaagctctttagtttagttaggtctcagctatttatctttgtttttattgcatttgcttttgggttcttggtcataaaatccttgcctaagtcaatgtctagaagggtttttccaatgttatcttctagaatttttatagtttcaggtcttaggtttaagtccttaatccatcttgagttgatttttgtataaggtaagagatgaggatacagttctcctacatgtggctagccagttatcccagcaccatttgttgaaaagggtgtcctttccccactttatgtttttgtttactttgttgaagatcagttggctgtaagtatttgggtttatttctgggctctctattctgttccattggtctgagtgcctatttttataccagtaccacgctgttttgatgactatggccttatactatagtttgaaaacaggtagtgtgatgcccccagatttgttcttttgacttagacttgctttggctatgcagactcttttttggttccataagcattttagaattgttttttctaattctgtgaagaatgatggtggtattctgatggggattgtgttgaatttgtagatttcttttggcagtatggtcattttcacaatattgattctacccatccatgagcatgggatgtgtttccatttgtttgtgtctatgtttagaaatctgtgatttctttcagcagtgttttgtagttttccttgtagaggtctttcaactcctttgttaggtgtattcctaagtattttatttttattgcagctattgtaaaagaggttgagttcttgatttgattcttggcttgcttgctgttggtgtatagaagagctattgatttatgtacattaatcttgtatccagaaactttgctgaattattttatcagttctacaagttttctggaggagtccttagggttttcaaggtaaatgattgtatcgtcagcaaacagtgacagtttgacttcctctttaccgatttggatgccctttatttctttctcttgtctgattgctctggctaggacttccagtactatgttgaagaggagcagtgagaatgggcatccttgtcttgttccagttctcagagggaatgctttcaacttttccttattcagtattatgttggctgtcagtttgtcatagatggcttttattacattaaggtatgtctcttgtgtgcccattttgctaagagttttaatcataaagcgatgctgggttttgttgagtgctttttctgcatctgttaagatgatcatgtgatttttgtttttaattctgtttatgtggggtatcacatttattgacttgcgtatgttaaaccatccctgcatccctggtatgaaatctacttgatcatagtggattttcttcttggtatgttgttggatttcgctagctagtattttgttaactattttagcatctatgttcatcaaggatatcaatctgtagttttcttttttggctatgtgctttcctggttttggtattagggtgatgctggattcatagaatgaatttgagagggttccttctttctctatcttgtggaatagtgtcaaaaggattggtactaactcttatttgaatgtctggtagaattctgttgtgaacctgtctggtcctggactttttgttgttgttgttgttgttttaatttttttaatttttaatttttttttttgaggtggagttttgctcttgttgccctggctggagtgcaatggcatgatctcagctcaccgtaacctctgcctcccaggttcaagtgactctcctgcctcagcctcgcaagtagctgggattacaggcatgtgccaccatgcccggctaattttgtatttttattagagatggggtttctccatgttcatcaggctggtcttgaactccagacctcaggtgatccacctgccccgatcttaggtgatccacctgcctcggcctcccaaagtgctgggattacaggtgtgagccaccgcgcctggctggtaatttttaaatgaccatttcaatcttgctgcttgttatttgtctgttcagggtatctaattcttcctgatttaagctaagagtgttgtatttttccaggaatttatccatctcttgtaggttttcctttatgtacataaaggtgttcatagtagccttgaatgatcttttgtatttcagtggtctcagttgtaatatctcctttttcatttcttagtgaggttatttggatcttctgtcttcttttcttggttaatcttgttaatggtctatcaattttatttttcttctcaaagaacctgccttttgtttcatttatcttttgtattatttttgtttcaatttcatttacttctgctgcgatcttggttatttcttttcttctgctggatttggatttggtttgttcttgtttctctagttttttgaggtgttactgtaaattgttcttctgtgctctttcagactttttgatgtaggcgtttagggctgtgaactttccttttagcactgcctttgctgtatcccagaggtttcaataggttgtgtcactattgtcattcagtttgaagcatttttttaatttccattttgatttcgtttttgacccaatgttcattcaggagcaggttatttaatttccatgtatttgcatggttttgaagattccttttggatttgatttccagttttattccactgtggtctgagagagtacttgatataatttcaattttcttaaatgtattgaggctcgttttatggtctgtcatatggtctatcttggagaaagttccatgcattgttgaatagaatgcgtattgtgtggttgttgggtgaaatgttttgtatatatttgttgagtccatttgttccaaggtatagtttaaattcattgtttctttgttgactttctgtcttgatgacctgtctagtgctgtcagtggagtattgaagtctcccactattattgtgttgctgtctatctcatttcttaggtctattagtaattgttttataaatttgggagctccagtgttaggtgcatgtatgtttaggattgtgatattttcctgttggacaaggtctttaccattatatactgttcctctttgtctcttttaatgctgttgctttatagtttgttttgtctgatataagaatagctacccctacttgtttttggtgtccgtttgcatgaaatgcctttttccactccttcactttaagtttatgtgagttcttatgtgttgggtgagtctcctgaaggcagcagatagttggttgctgggttcttatccattctgctgttctgtatcttttaagtggagcatttaggccatttacattcaatgttagtattgaaatgtgaggtgctgttgcttttatcatgctctttgttgcccatgtacttggttttttgtttttgctttttaacttgtatttttgttttataggtcctgtgtgatttatgctttaaagaagttctgttttgatgtgcttccaggatttggttcaagattttgagctccttttatcagttcttgttgtggtagtttggtaatggtgagttctctcagcatttgtttgaaaacaactgtatctttccttcatatatgatgcttagtttcactagatacaaaattcttgcctgataattgttttgtttgaggagcctgaagataggtccccaatcccttctagcttgtagggtttctgctgagaaatctgctgttaatctgataggttttcctttataggttacctggtgcttctgtctcatagctcttaagattctttccttcatcttaaatttggataacctgatgacaatgttcttaggcagagatctttttgtgattaatttcccaggtgttcttttgcttcttgtatttggctgtctaggtctcttgcaaggccgggagagtttgctttgattattcccctaaatctgttttccagggaaaacctggacatttaaatgctagtttaacatggagcagaggactccatttttgtaaaatgctgcaacctgggaatttcctttcataattttgatagacatatggcacttctggttgagaactgggcctatagcagtggcttaacttaagggttccatagatccttgccttggttcaacatatcccatctacgagatgacaaatgtttgattgaagaagtattgaagagtatttggaaatgtagacaaataacagtatctggagcttgcagcacagtgggaaatggagccaagactgtacctataatttagggtaaggagcaataatgaggtcccataaaaataaaaaaccatgatgttaaatagactgcagatcatttgcaccttgaggcttttcttagattttatgccagcaaaaaaagtagtaatagggcttgtgctttatgccaaaagaattcctcgtacacaagattttatttgctttagtgtaatcaaagagaccctccccctaaaattatataagggtaaaaaaaaacaaaacaaacaaacaaaaaacccatccagctataaagagctgccagcctgggtttggagcatggctttaatcctctgtgcctggggtcatattgtttttatcttgcttttgactctatttcaaagctgatgttgctatctacaaaccttacctaacagctataattatttcatttgtattcactatgaagtcctttccaatcatgttagagaaatggattccagtgtttgcaagtgaccccttatcctgtcttttaaagaaaatagcatatattgtaggctccccttatctgcatttttgctttccacagtttcagttacccacgatcaactgcagtccaaaaataagatattttgtgagagagagaaagactatattcgtataacttttattatagtatattgttatcattgttctattttattattattattgtaaatctcttaccgtgcctaatttataaattaaacttaacataggtctgaatgtataggaaaaacatagtatacatactatatatagtaagtggagagcacaccaaatgtatatcatttttgtactgtagtaaatttgaaaaattgtaggtcaacccattataagttgaggatggaaggtctgtctatagggttcagtattacatgtggtttcaggcatccattagtggtcctgatgtgtcctctacagacaaagggggactactgtaagtttgtaaaaccactgaacaaggagtttcaaatgtgataaaatattaaaatgggactcttcaagttcagctgaagccacaattaataggaatcaactggtcgcacattccaagatgagatgctagatcaccccagcaggacctgcaagagttctaaaatttggatcgtgtcattgcctgagctttcagacattagataagtcaagtcagatttgatccttagttttttcctttgtcaagtgggaacagttattgctacccagtgaccttgtagggatgtgtcaattgagatgctggacctgaagatgccatgaaaattcgaggtagtggttctctttctccttcttgcagtggggttttgggtcacaaaatgacaggattgtcctcagatactttatagaaagccattggtgctgttaacacagtatgagtttagtgtttcattttggagtcaaacacactttatttttttttctcacaactgcttctgtgaatctacttgcagggctagatcttctgccctggaatcatatcctagctagtgctcagagcctgccactcactctttggtagtaataactcctctcattggttacctgagtttccaaacagtgttggttatgctataaataagtatagtctagggtaataatcaaaactctgaaattcatccatgggtaatgcatcttctggcaccatcaagagcttgctacagggggagaagtgggctgagtaacttctttctcctttattcttccatatgctaggtgagttggataggggaagagaagagaagtaggagccaggatcaaatttgcttggctggtcccaacctggtattgatttgcttttctactggcagatgcttaagactggcctttcttctctgaaagctgtttcatgatttggacgcttatcactagggtcctcttttttgtgggtgattctcttttgatgataaatgaatcatctagggacttctctctgctgaggtctccttgcctctaacaaggcaaggtccaagactagctcagggtgctttgtcttgtacttggcacttacctcctccctggaaatatggatctttgacctaaaagtgttgtatagttatgtccccaaattgaatctgttttgtttagccacctagtgagcagctttagccatagtctttctttcactcattaactttcttagacttatgtaagatgggtatcagttcactgtgacccttaaaatgcaggggcacctaccaagccatctgagtacactaccaaagtccctctcatttgctagaaataaagggagtaccatagccctgatacttttccactggagggaagcattgcaagtacacttgaaaattctctttgaagaaatccttgccgggcacagtggctcacacctgtaatcccagcactttgggaggctgagcggggcagatcatctgagatcaggagtttgagaccagcttggccaacatggtgaaaccccatctctactaaaaatacaaaaattagccaggcatggtggcaggtgcctgaaataccagctacttgggaggctgaggcaggagaatcacttgaaccgaggaggcagaggaatgcagtgagccgagatcacatcattgcactccagcctgggtgacagagacagacttcatctcaaaaataaaataaaataaaaaataaaataaaataaaaagaaatccttaattcccaattctaagctcctctgatagtatattcagcatcttttttatgctatgcagagatgtactcagctaaggggtgcagacctgggtcttagacatctcctttgcaggtcctgctggggtgatacagtacctcatcttgcaatatgggaccagttgattcctattattttgtggcttcagctgaacttgaagggtcccattttaacattgtgttatatttatatcagcttaccccaaactgtagtctatggaacactgcttcagaaaagggttccattttttttaaaaagggtccttatcaagtgtatttgggaaatatatgtaagatttccagctcttcaggtgctcattgcatataagcctatcgaagaccatgtggaatctagcatgaggagtggtgtttgaccctttccaaacccagtgtttctcaaatatatttaaccacacaatttattaacatggtgtctctttgtttgcattttgggagatgctgctgtagatggttgctggtgatgcttccattgggtttagctaagaatgtccatacattcttccaaagttttcctaaataaaaaagcttaattccttcttagtagaaatgggctcattttaagatgagtatctgttttggaaatagtccatcagcattggcgatgtgaggaaaaaaagagtaatgagtaggcttgttgccttgcttattgcaaacagcaaaaaataaaagataagattataataatatttatatgtatcatagtaatattgattattatgatacaactcattataataggagtttgtagtatcctggtattctgtctggactttgagagcttagcttcaatgaactataaagggaaagtcatagttaattattctcacctggacaagatattgttatctcctgtgttttttaagtcactaccatcagttgcattggttttgagtcttcccaaatgtgtctacctttgggaaggcccaattggccagttcctagacagtttttttttatgtacacagctcattttcacatatggatcataacttcccaggctatcctagcatagcctatcccatctatcccctcattgtgtttcaatgataagatgatgggctttatagttcttttctgtttcaaactttgcaagtatttattctgaataacattagagtctcactagcatgaaaaactgtcctggtttgcctgggactgtcctggctttagtactcagagtcccacattctggaatcctctctccaaaatgcaaaatgtcttggttttcaatagtggatggcaaagcttggaaaaatacaaagcccatatgtcagcccaaaatataggtgctgaaagcaatgctgttttagtgtcaaataggtacagcatagattatctatcttccatagttattgttactattcacccctcccatgttgacaatcatgatttgcagttcacactaacggatcattcattattgtttcactccaattgatgaaactcaagtgtacaccataactacattgtaagttgagtgttaaaagtccatctgtctttgactttgtctttatattaacttgttgtgctttgtatcaagataatgccagtttaatttttaactttatgaatattgtgaccatattctctaagagttcagatagtgaaaatgaagatgattattataccaatgccagcatcctagaaaaagaaggttagatggttgctattttaatggcagatgaaaggactcatacgtctggattgggcagataaataatcaaaacagagcatactgcacaagatgcagaaaagaagatataaaagtgcatagggagactgaatcccacaattttggcatgaggtagacaagtacttctgagtcaatcaaaagtttcttgtctcccaagaagacaccaacgctcagttgaatatagcagccactgaattatcttgagtatacgacacaaataagcagcgtcattgcattattcccttgattgctttctgaaactgattaaaattatatttcctgattcacaggttgcagttaaagtgccctaggcatgaacagcaggggaagttttgggtaacatgtgctggccctctatgtagcagagttaattctgttagatttgaacaacaactctagtatatcaagaaattcttgaatcatggcaataagataatgttccctttagctctttagtacttgaacttgataaatggagattcagaatgtcttttggatttttataaagattttaatgaaactgtagaaacataaaacaaaagattactgataacttgtctaaaaacaagctagatttagctcatctatctgcatgtgtggcaggcagtgcaaatgtaaattttggtaaacttcattcagtgtgtaaatttcttaacaaagaaaagaaaaagatttcaactgctaaaagttcagtatactttttctgcaaggatgctaaaaaaaatgggatttgcttacctgtgatattgaggctttttctaaaactctctgatgatctttgaagaagccataaggagcctagaaaaggacaactgactatacccaagttgttggatgttatgtgtaggatgtgacagaaactcatacagaaaaaaaggacttatgttttggaaataagcctgtttcaaatgaaaaaaaaaaatatgttaccagaggactgccaggttaggccaatctttctcagtttttcaatttctttaataaaactgtcacttacttggaatctggctttgatttcacaagtttgaattacttctgtgctttaaaaccattttacctgccaaagaaaagttttgcttatgatgacatccaaaatgcttcgtagtgttttaaaaatgatcaacatattggacatggataacctatatgactagtttatagatgcagtggatctgactgacaaactgctggtccatcaaagcaggcatgtggatacaaagtggatgaacatttttggagagctagaaattaatccctacaagtcttaaatcctgatgttactagtaagtaaacttctaagtgttccatgctgaattttttttttttttttcggggggagaggatatttgacttggtggagtcataccaatacagtgtaaagtgggcttgataaagagcatagtctaaagttaaatcaagttttacatttgactatattcatttagttttaacactacagaaaagaatagaagtgtgttgtaatggttgaaagcagtttaaagaactattactggaaaaggaaacagagagtaagaatatcctgctgtatcatgctgtatcacaggacagatggaaacgtgtcatagtttttgggttttttttaatagacatgagggtacaagtacattattattacatggttttattgaatagtgatgaagagtgggcttttagtgtaaccaacacccaaatagtgtatatcattcccaataggtaatttctcatcccttacccctcagccacccctccaccttttggagcctccagtgtctattattccattttgtatatctatgcgtatacattatttagctcccacttatgagtgaaaacatgcagcatttgacattctgagttatttaactttagataatggcatctagtttcacccgtgttgctgcagaaaacataatttcattcattttagggctaagtagtattccataatatatacatatatatcatgcctctctatctacctatctatacatacatacaaacatacacacacactactatagatacacacacacagcacattttctttatccagtcatctgtggatggacacctagattgattttataactttactattgtgaatagtactgtgataaacatacaagtgcaggcaactttttaatataattttttttcctttgggtagatatgcaggagtggaattgctggatttaatggtagttctatttttaattctttaagaaatagccatactattttccataaaggttgtactttcattcccaccagtagggtataagcattcacattcctgtttctccacattcttgccaacatctgttgtattttgactttttaataatagccattctgactggtatatgatggcatctcattgtggttttaatttacatttctctgatggttagtaatgttgagcattttttcaaatgtttgttgggcacttggaagtcttttttttttttttttttttttttttttttttttttttgagacgtagtctcgctctgttgcccaggctggagtgcaatggcgcgatctccgctcactggaagctccaccacctgggttcacaccattctcctgcctcagcctcctgagtagctgggactacaagtgcctgccaccacacctggctaattttttgtatgtttagtagagacagggtttcaccgtgttagccaatatggtctcaatctcctgacctcatgatctgcccacctcggcctcccaaagtgctgggattacaggtgtgagccaccacacccagccgtatgtcttcttttgagaatgtctgttcatatcctttgcctaccttttaatggggttatttattttgtttttcttgttgagttgtttgagttccttgcagattctggatattagccctttgttggatgcatagtttacagatattttcctccattctgtagattatctgtttactttgttgattatttctttgctatgcagaagctttttaattaaatcccattagtctgtttttgtttttgttgcatttgatttggggctcttagttacaaattctttgcctaggccaatgtcagaagagtttttgctaagttttcttctagggttttaatagtttgaggtctttattccatcttgagttaatttttgtatctggtgagacatatgggtccagtttcattctttcgcatatggctacccaattttcccagcaccatttattaaatatgatgtcctttctccagtatatgttttgtcaactttgttggagatcagttgcttgtagatatgtggcactatgtctgggttttctgttctgttgcattgattgatgtgtctatttttataccaatatcagactgttttggtttcaattgttttgtagtataatttgaagtcaggtaatgtgatgcctccagcttttttctttttgcttaggattgctttagctattcagtttcttttttggttccatctgaattttaggattattttctctatttctggggaaaataatattggtgattcggattcgataggaattgcattgaatctgaatattcctttgggtagtttggtcattttaacaatatttgactttttaatccatgggcatgggatgttttttctatttgtttgtgtcatctgtgatttttttcatcagtgttttgtagttctttttgttagagatcttttaccttcttggttaaatgtatttctaggtattttacttttttatagctattgtaaatgggattgacttttgtattttgttctgagtttgattatttttggtgtatagaaatgctactgatttttgtaggttgaatttttattctgaactttactgaagtcagttatcaaatctaggagtcttttggaggagtcgttaaagttttctaggtatcagatcatatcatcagaaaacagagataatttgacttcctctttcccaatttggatgccttttatttatttcttttgcctgattactctagctaggacttccagtactagaataggagtggtgaaagtggcatccttgtttagtcccagttcttagggggaatgctttcaatttctcctcattcagtatgatgatggctgtaagtttgttgtatatgtcttttattattttgaggtatgttccttctatttctagtttgttgagggttttaatcatgaagagatgctgaattttattgactgttttttttctacgtctattgagataatcatatggcttttgtttttatttgtgcttatgtggtgaatcacatttattgatttgcatatgttgcaaatccctggaataaaacccacttgattatgatatattatgtttttgatgtgctacttaattcaatttgctgctattttgttaaggatttttgcatctatgtacatcaggagtattggtgtgtcttttcttttctctctttttctttttttttcttttttttttttttttgagacgatgtcttgctctgtctcccacgctggagtgcagtggcgccattttggctcactgcaacctctgcttccccggttcaaacaattcttctgcctcagtctcccgggtagctggtattacaggcatgcgccaccacgctcagctactttttatatttttagtagagattgggtttcaccatgttggccaggctggtctcagactcctgacctcaggtgatccacccacctcggcctcccaaagtgctgagattacaggcgtgagccactgtgcctggccttctttgtgtgtgtgtgtgtgtgtgtgtgtgtgtgtgtgtgtgtgtccttgcctggctttggtatcagggtgatattggctttatagaatgagttagggaggagtccttcctcctcaattttttggaatactttcactacgattggtgccagttcctagaatgtgtggtagaattctgctgtgaatctgtctggtcgtgggcattttttgtgattgttaggagattttttactactgattcaatctcactacttgttattggtttattcagggtttctattttttcctggttcaattttgggggttatatatttatcgatttcctataggttttctaatttgtatgcatagaaatgcccatagtagtcttttatgagcttttgtatttctgtggtttcaattgtaatgtgttctttatcacttctgattgtgcttatttgacttttctctcttttttcttgtttagctagcagtttatcaattttgtttatcttttcaaaaaaacgactttttgttttatcgatactttgtgttgttttttgattttaattttatttcgttctgctctgatctttgttatgtattttcttctgctagctttgggtttggtttgttcttgtttttgtagtttcttgatgcgtgaccttagactgttaatttttgatctatcttttgaatataggcatttaatgccataaactttcctcttagcaccacgtttgctgtattctagaggttttggtttgttgtgtcactgttttcatttgtttcaaaaaattttttaattcttgccttaattttgtcattgatccaaagatcattcagaagcaagttgtttcatttccacatacttgtataattttgagagtttctcttggtatcgacttatagttttattctactgtggtccaataaaatacttggtatgaatttgagtttttaaaacttattgagacttgttttatggcctaaaatgtctattttggagaatattccatgcgtagatgagaagaatgtatattctgtggttgttgggtagaatgttctgtaaatatctgttaggttgatttgatctagagttcaatttaagttcaaagtttctttgttgattttctgcctccatgtcattgttatttttcattatttataggtaatatctgtttctaatgttattttcattttctttttaaaaagtcttatgtttgtgtatcttaagaatatacataatataggccaggcatgatggctcacacctgtaatcccagcactttgggaggccgaggcaggcggatcacaaggtcaggagatcgagaccatcctggctaacatggtgaaaccccatctctactaaaaatacaaaaaattagtcgggcgtggtggcgggcgcctgtagtctcagctactcaggttgctgaggcaggagaatggtgtaaacccaggaggtggagcttgcagtgagccgagattgcaccactgcactccagcctgggcgacagagcaagactccacttcataaaaaaaaaaaaaaaaaaaaagaggaatatacataatatagcctataaatttaaatatccaataaagtgcttaaaaagtgttaaaacaaattgctttatcagaggacagaaacattactgtaatatttttctcacacatattatttgtttagttagtcctactattaattaatgttaattgccactgttaacaacctatttttatttaaataataaaatgcatgtagctgaaaggtaaatactatagaataataaataatttcaaataaaaccttatttttaacatttttgtgttaaaatactaatgtatgtatgtattagtaattaattattgtaaatttttatctttgcttttttttttttttttttggcttggaatggctgtaccctaggttactctaatggtcaccagggtacttttcccaagcccgtaatgttttaagacaagcaagcaaatctaattctcattaattgcctcttacctggtataagtaacctctcacattggacactgactgtaaaaggagttactattacattatccttatcaattatctgtgacagtggagccagtaattctcaaaacatttgtacgtcatttaggactctttttaaagtaaattacatttactttaaaatgtaatttatttgatatttggtatcttcaattttttgttggtgctaattgaaaaaaggagaattgacaatagtccatatatatcaccaatacctgtacatatctggtaattggctggggactgaaacttcttttaaatccagtagttagaaaatgatgcttatattttcataattgtgccctgtatttaccatctcgcaataatccataagagttttctggtattccaagcccttgtggagtgtccctttcttatcactaactaccctctcctcacatggaagtagacatataccctcatatccggtaagcatctccgtgcttacaaaagaatatcccactcctttagctctttggctcctttcttattcctacctatacttcaaagccccttgaaaatgccctccactttacaaaactttcttcagaccatttttctaacctacactcctgtgtaccacatgccttactactcagctaccatcttgtattgtcctgtgaagtctcatctgttctcttcttggatggattgagaagtagagatcatggcttattcttcccttgtatccacccagaatactagaacaaggctaggcaggttgtaattgttcaaaaaagaccatcaattggtttttataaatgatgagtcctgcaacacatgacatggaagtaggcaaataataatatatcttctcatagaaacgttgtccatcatgtttaacagcacgtgaaagcacattgttgcaatggaaaaataagtgaagacaggaaaaaatgaccatagtaaccctgactcctgggctaagattttagttaataccgtactacttctgggtagagactctagattatttaaaacacatagacacactcacatgcacacattcttacgcacatgtacacacacaagcacacaaagaatgggggtttggccttgacatacttttagaatttgataccagtactttttaacagcatggtctaaagttggaaaaataggaattcagtgtctagttgagttatgagttgagaatgaatttcacaacaaacctcgatgattttccaccaacaacaccaacccaaagacaatcacttggtggccatcgtattgcaaaagaagcagagcacagacatgctgtctgtttcacttaaatttatgagaacctgctgaaagggaatgtagaaagtaaacgacccatggtaaagcattgtgaatgaagggagaggtgctgtggttagctgggttgctcaattcctcagattctcaaagccaggagaaaatttatcctcttccactgagacataaactaaactccttttggccattaatctgcaaagttgatgcctgccatggtaattcatcagacatttttgtggggtgagtctggtggggcctctggggcatctgcctttgaaattcaaagaacagctttgtcccctggggacagagtgactttcttccctcattgcacatctggaaggggagtttctgctcccactctcccccaagccaaggcagggcctgaaagagctgccatcttcatgaagcatgtacttgtacctcacttttctgatcactctacccagactgtcagacgaagagaaggaagagaaatacagccagcacactgtttgtaagtgcctttttcccattacagttcagcacagagaaaggacaattactgtttttagtgggttttataggagccacagtcactgcactaaccattgtgaaaaatgagcagaattctcaagctacatgtctcaatcatctgcacataaattgggcaatggttttggaatcttggggtctaatctgaatttacaagtgtgtctccaggcccagtgacaaatacatgatctgaagacagcgggcattactatgaagaacatagccttgggtgctgggctcatcttttgccccttcagtaacaggcacctgccaatgccttggtctcttagctggaggtttctcctgaaccttccagtccttaagtgaactggccgtgttttctctacaggctcctggtcctctgtcctccagctctgcaccacactccagacacagtggttacctttcagttttttgagtacaccaatgtcttttcttttttttttttttttttttttttttgagacggagtctcgctctgtcgcccaggccggactgcggactgcagtggcgcaatctcggctcactgcaagctccgcttcccgggttcacgccattctcctgcctcagcctcccgagtagctgggactacaggcgcccgccaccacgcccggctaattttttgtatttttagtagagacggggtttcaccttgttagccaggatggtctcgatctcctgacctcatgatccacccgactcggcctcccaaagtgctgggattacaggcgtgagccaccgcgcccggcccaccaatgtcttttctacatagaactatccaccctgactagaaggccctgccgtacaatctttgtgatattggcttcttttgacattgaggtttcagcttgaatgtcatctcctcagagaggtcttctgagaccactcagtttaaaggagccacaaccagctacccaccagtcactttccatcatttgtcagtgtgtcactttccttgtgacatttactgatacctgccatttttttttctctctctcttctctttctctctccagccctctttctctctctctccccctttccatcccacttctacctctatgaaatagtaaactcccaaagagcatggtccttaatctgtcctgttcactgtgctatgtccataggatgtgttcagtcattcttgctgaatgaatggtttccctgttctttgggtgtttgactgagggtagcatgacatttacagtaaagtttatgtcatttttcatattaaaaaacatgcttggatcaacatcttttaggtagaattcactcttatacatttatctattaaccaatgtattcatttattcattcaattgatatttgttatctactatatgccagataccttggcgagatgttacagatgtcagagaagtttcggccagggaaatgatataaagaaatggagagagacacatgtgaaaacaaaatttcatattttataccgaatgttatatccagacctgtctgtctaatatccaattttctttttctagctaaactgctatctttctgctccaactgtctgctctccagtaaggctctttcttcattaccccacaattggacctcatcttcacttatgttattactttattctagactgtcttctctctgctgttttctttgaggccagttcaggactttccgtcccaggaaggtttccacaactctgtgagctcccatttgtcccctgagctgttctctttagtacgtaaagtctagacccttcaaaaatttagagctttgtactgatgatgattttgcttggatttgtatttcttccacatgtgttaatattgaaaacccaactcaattctatcttctttgagaaagcagccatgttttataattcttctaggtctctgccaatatcacaggtagtatagggaacataatagcagtcaataaattcttactgattgattggtgtcgaaattgggttgtcagttccagacggcatgctgaatgagagcaggtctgggaaaagcctcttcagcattcagcctccctgtagatcaagtacaggcaaagcttatggcaaaaggtggtgaaaggcaaaattccaatagcaagagtattattaatctacttaaggcattaagtgttgtccagtattagattggaccggaaatcctggttttcaactctttcccatttgaatgcccaagaggctgtcagtgagtgagaggaaatacggaattggctttcagttgcccgaggagaggagcttaaattcctagatttatggctctactttacctgaaacttttattttgcttttacttttatgtaccaatcgagtgtactctatttctgttggtgcttcctaaacagtctaagggagctctaaaaataagtaccaaccaatttatacagtaatgttcatagcgttgtttacagaatgcctcatcacaggtcggtatcctgggagaccccaaaaggtatgatactttcagagaggggccttagtgaaggaggtatagtttgcagtatgaatggtctgtctgtgatctctgaactcaattattctggtttttcaaaatctagtagtagtaaaagaagcaggcagagtgtagtagtcttgtgtcccgaatctctttactaacatgccatcttgctgcttctgtttggcctgattttcctcatcatgctctacatttctggaagtcctttggtcttccttctgttgaagttttctagctccttcatatcccaccttatcctcatttcctggagtgaactctttcttctttgactctctatagcactcaggtgcttcttcattcatttgctgcttattaaaattgccatttaatgtgtatgcatcttgttttcttaagttgactttaacctattgtttggcaggaactttgtctcatacttcttaatatctccagagtgcccatagtaaatgctcaataaatatttgctgctaatgatatatcttagttgactcatcttgtttctggtaaattttactgtaacaagtagcaatataatgatataacttaaaagaggacaaagaaaatctagagggactttgaacacttgattagaactctaaaagggagaaattctttcagtgttggtcagtaatataaaaattattttgaatgattttatcaacttgacatatctggctattattacaagtgtttgtttatgtgttaatctctcctaaacttgacaaggatagggtcttcttaagcacaaagtctatatattttatatgtccttggctttatttggattaccaagtgagtagagagctgaaaaaatatttattaaatgcataaatgaatgaataaccttcaaatccaaagctagaaattctgttaaagaaaagatttagaccctctatctctcaaagttgcaagttactaatgctgctcacccattttcggttaatactaatagtctgtcttctacatggggaagtttgttggactaaaatgtgataatagggaccataagttgatgcctttgcattggctggtttgggaatagctgttgagaggatacaatgtagtttcttttcagttttatttgtcagccttgatcttggtggaggaacatgttcttaacacctacaagataacaggattgtttaaacattacaatatcacaccccatatttgagttttatgaaaaactgtgaatagggccaatgtcctaatttgtcaaaaatgttaaactaatattgcaattctataaaataaattattgacagattttataacataaaaatgtgtatttttatatatctgtagcattataagcaaaattaaggaaaataagctaggagataatattttaaaatataattaaatattttattcctttattataggaagagcttttacgagttctactgaacaacaacaaaaaatccagtagaaatgttggacaaaagatgtgattatacaaaactagaaatgcaagtaaacataaaaagctcaaacttacttaaaaacttaaaatgaaatattcgtaaataaaactattactgagggcctataaaattttgggttaaaatgaaatggtaatacttaataaatgttagggcacaatgatgctatctttcttacatctttctttttagaagtaacttatttcaatgtttctggaaagcaatttgataatttttatattactacaaaaatatggtagctaccctttggctcaacaattttttagaacacaaaaatgcagtcaaagatgtatataaaagactgaaagtaattcttcatagccttgtttatatgaaggaaaactgaaaacagcctaaatatttaacaataggtgaaatgattagaaatgtggtatattcagagcaggcatagtggctcatgcctataacccagcattttgggaggctgaggtgggcaaatctcttgagcccaggagtttgagaccagcccgggcaatatggcaaaaccctgtctctgcaaaaactataaaaattagctgggcatggtggtgcacgtgcgtgtaatcccagctacttggaaggctgaggcaggaggctagattgagaccaggaggtagaagctgcagcgaggtatgatcatgccgctgcactccagcctgggggacagaatgaaacactgtttcaaaaaaaaaaaaagtggtatattcagatgatcatatattatttaacccacaaaaataagtctttttaaacttaaatttaaattttttaagtgaaagcaagattattaagaaagtaaaggaataaagaatggttattccataggcagagcacaaaaataagttttaaaagagtaccatgagattgtgcttataataacaagtggggaaaagtactaaaagctacatagagcatctcaatttaatggacccacacaagactttgaagaagttcactgaaatatcagcagtggttctcattgcacaataaaacagactgtgagtgatttttttgactgggtcaaacatcattgtcctgtcatctttgtgtgactgagaggctaagtgtcagaacactgtagatatagttagtttgaaggaattcattcattctttgaacgaaaaatgtagtatgtattatgagtctggtaccatgctagatcctgtaacaaggagcttagaatgaaatgtgcgatacagctaggtcagtagatatctatgttctaagtattattgtattaagtgcttggataatatagtaatgaggatgataatgatgatgccatagagaccacttatgtagatcttctagtttctgttgctgtgtaacaagttataccaaaagtttagtaactaaaaccaccgttgtattcagctcatggtttctgtgggtcagggattcagaaagcataaggtaatagctttttctctacatcacaatgtcttcaccctcagctgggaagacatgaatgctagggctgacttgactggaaatgggaatgatctgaagactcatgttcatacattcatctgtttgggctaggaggacccacagatgaggatttctaactgaaatgcctacatactccttgtggcctggcttgcttgtggtttggcagcctcagggtagttggatttacatgaaagtgcaaggtttcatgcccatgcattctagtcagcaaagcagaagctgcatcagaagtttttctgacttattcttggaagtcacacgtacacactgattcaagggaaggggacacggataccaccttctggtgggaggatagtcatgttgaagatcaaatggaattggagatattgtatgtgacttcattatgtgctagacattattcatactgctttctagcaagtagttcatttaatcctcactacaattcatgaggtaagtagtattagcattgcctcctttaaacaagaatctgaagtcatggagctaagtagcttgcctaaggtcacataataagtggcaaagctggacttcaaactcaggcagtctggctccagtgtttatgctcttaatcagtggaggtgatcaggttactagggacatatgcagaagacctgcctaaccctgacacaggacagggagcagggagtagataaaggaaggctcccttgaagaagtgatacctaaactgagttatgaaggattaacagaccctagtttgagacttgaaggactaataaaatggacagtagttagctgggctgtgggtagatggttggaatgggaaaatgcctcatgaagggagaacggcatgtagaaagcccccaggcaagtgagtacggcatattcaggcaattgcaagttgctcctcagtgctagaattcagagctgtggtggcaagtttcgaatggtgaggctggagagattgacaggaataaaattagaagggcccaagcaatccaatgattgcttgatcaccatactgagagatcaccaggatggtgatgttactgaattgactcttctgttttcctcctagcaattagccatgtatttattagcatttgccttttttattgtagtaaaatatataaaacttaaaattcaccatttaaatcatttttaagtgtacagttcagtggcgttaagtaccttcacattgtggtaccacgatgaccaccatccatctccagaatcttttcatcctgcaaaactgaaactccatactcattaaacactaacttcccattcactcctcccctctagaatccaccattctactttctatatctgtgaacttcactactctaagtacctcatataaatgaaattaatattatgtggacttttgtgcttacttatttcgcttagcataatgtcctcaaaattcatccatgcagcagcatgtgtcaaaatttcctttcttttttaggctgaataatatccaattgtatctatatgccacattttgtttattcattcatcttgttgatggtcatttgggctgcttctgccttttatctattatgaatagctctgtacatggatgtacaaatgcttcttaagacctatagataaatctttgagaccttgtttccgattcttctgagtatatatacagatttaaaatggccagattatgtagtaattttatttttaatttcttaaagagttaccatactgttttccatagcagctgtaccattttacaatcctaccaacaatgcacatgattccaattattccacaggctcatcaacatttattattttctgatttttgcttgtttgctcgcttttaaaaatagctatcctaatggatataaggtggtatctcattgtggttttgatttgcctttccccatcttttcatgtgctcattagccatttgtatactttctttggggcaatgtctaagaattgactttttagaatgatccctctggggagaagtaaaagggtagaaggagggtcagaatggaggcagggagatcaggtaggaagttgcactaaactagccaagatgtgataaggcttccatgatgcaactaatgaaattgtatggggcagtggtggtggtagatagcattgaaagattgttttgcaaattaagcagaacaaaaaaaaaaaaaacaagaaaactcaatgttaagtggatgatggcaccatgactggtattcagtcagtatgtacctgtgtagccattctggctgaaatacttccatggcagctcccccaagagtgccccttcattgcccctcccatccaggtcttcaaaatccttaaactgcctgtatgcccccataattccctaaataataatgaatgctgggtacagtagggggtaggggaaccttggactctgctccagctcagtagccagggtccattcagatttgtcagcccccttcccctctgatttactcctggatagcagtaccatttcttgacacatgtactgatgtggaaaagatttttggaaggtatgaagggagttcaccaaaggtgataagttttatttggggcctgtttgtgtattcacgtggagagagttagcattcttggttctagagaaaaagatttaggaattttcaacatatgatagtcatagaacccaagaacttaccatccaatggaaatattttccctctgcagtgacaccattctttcataaaattattcacaatttagcaactatgaacaggaataaaacctctaaccaatattccaaagaggtcagctgtgcctaaaatgcatgttggcagaatgtagtcacattcccagattttaggaagccaggaatccaggaaggagtcttcctctttctgtatagcaacttaagcttatttgaaggtggttgttcactccctcctggagtgcccttagctgcagacaaagagagtgggattcgtgatgatcatttggcatcatgtccctgacagatagcctacaatgttaccagaagctgatgaggcttattttggttttgtttcgttttgtggaaaaccagaagggatctcagtgttgctgcctgcaggataagtaaagataacctactatgtattttattggcaatcctgatagcattttctccattggtggtttatgtgtaatagagaccaaactgcaattttctgacctgccaagatccattatgtctggtaaatatagtttatgcttgacagaatacacacttagggtggaaagccatgcaaattaaactaaggtttaggctaatttttggtagtgaaaattattctcccttggtgaccttattcagcatgaaataaaacaaccagaaagctattcatgcagtccactctttctttaatcaaaataatgaaagctttggatagcccagctcctgattctcatagctcttgtctttcatggagcctaatcttttatggtcataagaagcttttttgcatgaataggttagagattaggtagtaaaatgccttatttaaggtaactgttcttagtctactttgaagtctatgcaaattatatctgtctatggatttatggagactgtatcaccacagagtcttgatctgttaacataaatgatattttaaaaatatttacccattgtctgggctaccaaactttagtcttatgttggaatagtgtctgattgctgacaagctgagcagtagttttgacagagctaaataaggagaaaagccaagctttaataatgttgaccataagttaggaataatctcattgattgcttagtacagctaattctattttctgatgataatttgcattaatatattcagtttatgtagcttagtctccaatattatctcggtaatcccatcttcattcacagtggaacagaaaagacagagttggaaggcttgtaggtcaacgtaacaaacttgttctatctgctggctctcagattcttttcttttaaaatatgtttttaaatcaacagacaaaaattgtatatgtttgtcatgtacaaatgttttgaattatgaatacactgtggaatggctgaaaggggttaaataatacagattgagtatcccttatctgaaatggcactggaagtattttggatttcacattttttgggattttagaatatttgtattatacttaccagctgagcatcccagatctgaaaatcaaaaatccaaaatgctccagtgagcattttttttgagtgtcacattggtgtccaacaagtttcagatttttgagtatttaggatatcagattctcagattggggtgcttaacctgtatgtgcattgtgtcacatagtttattatttttttttgtagtgagaatgctcaaaatatactcttagtaattttcaagaatacaacatattgttataatctatagtcaccctgttgtacaataggtttcttgaacttatttctcctatttaattgaaattttgtatcctttgaccaatatcttcccaacttacttatactcccagcagtccccagtaaccaccattctcctctctgcttcaatgagtttaacttttttaggatccacatataagtgagatcatgtggtatttgtctttctttgccaggcatattttactaaacataatctccaggttcatccatgttgttgcaaatgacaagatgtcctttattaaggctaaatagtagttcattgtgtacaagtacaccacactttcttaatccattcattcattgatggaaccgtagactgattccatactttggttattgtgaataattgctgcataggagtgcagatatctctcctacatactgatttcatttcttttggatacattcatttcttttggtgggattgctaggttatatgtataataactgtatttttaattgaggaatctccatactgttttttaacttacattcccactggtaatgtacatgggttccctttttcccacatccttatgaatacttaccttctagctttttgataatagccattttaacagatgtgaagtgatatctcattttggttttaatttgcattccctgatgattaatggtgttaaacattttttatacacctgttgatcatttgtatgtcttcttttgaaatatgtctgttcaggtcctttgcccatattttaattgggttgtttgcttaataatgagttgtttgagtccttatacatttttttatattaaccccttatcagatgcatggtttgcaaatattttctcccattctgtaggttatcttttcactctgttgactgtttcttttgatgagcagaagctttttagtttgatgtaatcccaattatttatttttgcttttgttgcctatgcttttggggtgacatccaaaaagtcattgcccagactaatgacatggagttttcccctatgtttccttctagtggtttcgctgcttcaggtcttatgttgaagtctttaatccactttgagttgattttattatatggtatgagataagggtctaatttttttcttctgttgtggatattcagttttcccaacattgtttattgaggagaccgtcctttctgcattgtgtgttcttggtacctttgtggaaaaccagttgactgtaaatgtgtggatttatttctgggctttctattctgttccattagtctatgtgtctttatggctttcaaatattgtgagacagaagaacacaggatacaccctcttcacacttgccattaatagcccagtgcagccagaatgaacaaggtgttacagaatgtgatgcaacaacaagggagtgataattttattttaatttaaaaaggcattctcagaaactgaagtttaaataaaccatttgtttaatggctttaatgtggacactagaaggcacaaaggtctgggctattgggattccagtccattttctggaatctttgccttcagagggcataaggtaatcaagtacgtgggaggtaagagtccaaatgttctgtattactctcatctttctgtgaatgaccaaattcttctgcttttcactggcaatcatatattttgtcaacttgtgaaaaaatactctacaaagatgaaaattgaccttataaagattcttcacatgtatcacatttgagaaggttgtgttcctgactgaagaatcttgccttggtttgttgactctggggttacactgtgtccagttatggctccttggatgaaggccctgtgttgtttttgagtcagctcactcagctttctggagggcagttgattccatgaaaatacttgtctatgtgatcaagcagtgggggctgaatgtgtggctcttcacaacagaatgcaaggcggattactactattcctacagtgctactgttattattaattttaaaaacatacaatgtcattatcaaccttgatctgctctgcttttgtattttagtaattgattggatgagaatgtgcccaggcatgctttaatcactggaagggcaccagggtttaatcttccaaaggggtttttcccattgttatttcctgaaacatgcttgccattactcaagtggcatacaaaataaaattcaaatcaaaacagcaaaagagatgtgatccctctcttttgtgccttcttttaggcttaattctcataagtagaacatatctaagaagagtaggcttttgagttccaggcatactacttctaaactcttcacttaaagctagcacattcacctgaccttgaaaaggtgaatagatacacactgctgagattaaataaggcaccacagaagaataactacaggaggagcaagtaagtgcaataccctcttgtatgaagtgtgaccaacctgaattaaaccatatttctagtcctccctcagctccaaacttttcagagcttttgctcaatgactccaccccattgtatccttggctgactctcataattgcctcattattatattttctatataatatgcatctttggattcatagcccaacaatctcagctggttctcctctgtagtttgtttagcagacaattgtagtcattgcccctcagcccatacaacatgggggatctggatggaaatgaaacgcagacttggctcatcagagggcagcttggcttcacttgtatgccacaaacattgtcacctcataacactgacagtagtcactgatgagcacatttgaacccattcccaaaagtgcattgcctccacaccacatgaattagagccatttgtgttattttgcttatgtgttctttttcttttctctgttgtgtattcagattcccatattagttttccttaatctaagacttacattagatgactctagccagactgtcaaattatttgagaactctctttgtagctctaaatctagggtagtacctggtagtcaataattatttatcaaatgaatggatatttttcaacacttactggcaatcaagaaataattgtatttctaaaacagtgtgaaaacacgatgaattgaattgaattggcgagaatagaatataaactgcataactgtaagagatagtactatacaatagtgctgatgacattttgttttgctttattttattttatttattttctggggctgcctgatacaaaaagttccttgtgaaaagagaagattggaatccaattagtagattggaattgatgagttagttaagggctttagcatcctaccatgggctgtggtttttccccctgaacctatgggcatgttttgattgaagatgatggctggaagctgccacgtttgaagggctagagaaagagcctgggtttcctgtgtcagatgatacaaactagaaactagaaacgctacatggtagggaggcagtgggggacagaagaaaagacatcattattctttgtctcttcttttccctgggggaaatgttggcatccaaatattcaacagtaggttgacatgtggaaagtggcctagccaaaggatctgtggtgatcgggagtcataaatcagatatgagagggagagaccatatggtgcagaaagaaagtgacgatgcgattctttcagctatagccactcacgtgcactctcttacccagtagagagaggggcccctttccactgtttcttttctacttccccagtgaacctgcaggaatgtcagctgaaataccttgctcttttctacacatttctgaatcagccaagatgtcagtgacctggaaaggactcaggtgagagccagagaaatgattaaagagccggtgatgccgatgatccagtgggtgtctcctctccgcaccactagaactgacttatgggaagatagtcaaataactagatatgtgttgtttggcccagggcagacaagaaggaaggtatggggtaacttgtctccaatggagttgccaacagccaatgaattattgtgtcttttcctctccaaatggactgtcagtatacatatatatattttcaagttttattgaaaatagttacctcaaatttacttgcacttattttcctgagagtctgaggaatcacattctcattgctgcaggcccccagaagttttgaaacagcctctgccacgccacgcaactctactcacccagagaaattgccttccctcttttccctcaacttgtctggagatgaaaaggatgagattgaaaccccttttcttagagacacgtcccctcccttgctggtttctggcttctcttttcggtgtgtgagcaaaatcattttattaaaccatttgtcagggggcagatgggaagtctgtctttcccattagttagcagaaagtgaccccagcagctgtggagggaatcggtcaagccattgctaccaaccagaccagggtggagaaggaggccgggctttgctcagttgtcacaaggtcccaggcggctccccaggagccttggaactgatgaggccctgtttttattggccatgcctgtggtaggctgacttccttcactctgagcttcaggccagccagggaagggggcaggggccactagcattgggaagctttcgtactttgcccttaacactccatatccctgtttaattaatttcctaactttgtgggggaaaaagatgaaataaataaggccaactgaccacttcataatttgtttctgaagcttggctggacataaaagtctcccttccaaaaccacacggcataatttattttacgattccctctcggcaccaggtctgggctaaccttgagtttggaggctgtgccttcgcttcctggtgctggtggtcacagtgtgtcctttcttggcagtggccatgggcccagcaaaacagacctctgaaaggcgagcagattaatcattttgaaggcatgctcgcctcaacagttcccctgcaggatgtcggagaaccggagagaggggactgctgtagttcacaaggggcatagggaaatgcctgaagactcacaaaaacaagggggtgaacaacagaaaaagaatgagtgcttttaaattgtacatgctggagttttcactaaccgaaaagtattaccaaaaaatatattgccactcctagagcacaaactgtgatgagtccaacccttttattacaatcaggctttctctaaatatattatgccctgcaggtcaaaatgatttacttctctattttgggacatctgagttctattctactgttgccagtatgttttcagctgtgccagaaccgagcaggtctgcggctcctttgtaacatcaaaacggagacatttatcattgagatttatcatgggacagcctgccagatggtttgggtattttaaaggtgaactgtttgggccttgattagctcatgcggacttctagctaaagacaactctatcagctgctcagtggaaagacactgacgtccccctccccccagctccctccctctgttcttctagtaatgcagaaaatattaatgtaatggcagatgtggcatagattgtcatttcaggaagaaaaccaagccataaccaattccactgattgcattctaattataatgtgacctcctgttgctttgcatagaggcagtattcatttcagtacaccactgtaaaacttgcctagtcaacgaccctcaaaggggcaattgtaagatttaagcttggatttttttgctcataccaaagtcctttattctgccaagcctctgctgattgggccagaaagaatgcatttgattatatagactaaacttattgggaacagaacctctgtgctttgaaatgcttttcattcaaattacattcagacattcaatcaacattgattatgatatggattggcaacagggaatgccttgggtttttggtctggcttgaaagtttgctgagtttcgtaccagataacaactgggaagccagctgagtttccttaaccttttccatgagtttctcagaaaaggatggtttctcttgggaggccaggagttccttattcccacttgatgcagtattccaagatcatttcttcacttggaaaatttgggtctttggggcttccaaatttaattaacctctgatagctttgggaaatgtgtgctcatttgtgtttatgttaataaagtaggtccttgactttgtgcatgaaaatctaggagaatgcatcttagattcagattccaggtctaaaattttgtatcatggaagaaagtgatcatcactaattctggtcatagatgttgtctgtgtgatttagagcaaggctcagttttctcatctgcaaaatgaaataaaggtgatcccaaggtttaatttctaataaagttgatttgaaaatactaagaaacaatataatattgttattattatttacatgtcagtgtatgtgcttgtgtttttgaggggcctttgcctgcatctagacctctctgtctctggaaaaatcctggtgggatcagttttcgaagtagttggctcttggcagactcgcagacatactaaagtttttgttttgacttgaaggtcctcttccggcccttctgaataactttaacctaaaagtcaggctagaattcccacaagaagagagttgccagggcatcctcattccaagctataaaatcactggagatagctccattttctttatccaatcacatgccatgagctgtcatttgtgtacagatgtctctcaaatatagatttccagccttcatagcattcctgaaatttagcattgctaagtatatggtcaccttgaatagtattctaggatctcgaattcagtacgttctctttttccccccaaaacaatggcaaccagcctctcctctgttctctctttctcttaactgctcctgtagttccagttactagagttcaaaaccttggaacttttattttctcccttgtctttacttcccacatagaactagttgccaagtcctgtgaattataccacttgaaaatatctgttcttcctaaagttagtgctttttcattgagtctaatcatttccttcatggcctgtgtaatttagtctttccaccaatccagtcatcctaccatgatgtggcagcagcttctaagatggtccttataatatctgttatctggtgttcatacccttgtgagatctcctccccttatgtgtggatgggacctgtgatttgcttgtaaccagcagattatcgaaaaaagtaatgggatgtcactttcatgattaagtgacataggattgtgacttctgccttagtagaaaacttttttcctgctgatcttgatgaagtaagaagctatgttggagaggcccacacggcagcagcagagggtggcctctggccaacagccagtaaggaactatggccctctacccaagaccccacaagaaactgaatcctgtcaacaatcttttgagcttggaagcttccccagttaagcctcagatgagaccccagccctggtctgtaccttgataacagtcttgtgagatgcctaaaacagaggacacagctaagctgtatccagattcctgacccacagaaagtgtgagacaacaaatatgtattattttaagctgttagatttgtggtaatttgttacctaatattagacagctgtatcctagagcagctagattactgcctgacaatatcagtcttttgctcagaaatactcagtgtcttcatgattctttgtctttggccttgaactccctattcaagctgttttccaattctccttcctgagcacaattacctctgtactgttcatatttctggctttctgccttttaccttttgctgacatcgttaccatttcctggattttctttatgactaaatctcacatcttttttaaaggcccacttaaatgtcacctctttcataaaagcttttttgatctctgaagctatatagatctctgagctgccatcgttctatacctcaggttcctattcattttctacctcataggggactggtttgagaacattgctgtatctgtactacaggttgaataccccttatcaaaaatacttcaggtcagaagtgttgagaatttggggttttgggggagattttggaatatctgcattatatgcttacctgttgagcatccccagtctgaaaatccaaaatgctcatttgagcatttcctttgagggtcatgttggtacataaaacattttgggtttcggagcattttggattttggattttcagcttagggatactcaacctgtgctaggctgcaaattatatgaaggaggcttcttctgattcatctttccatgcccttgagcttccaatataatgacttaatggatggtatgctctcagtggatgagactcaatggatggtatgctccagtgactcaatggatggtatgttcttgttcatgaagagcaagccagtgtgcccacaggacagcaaaacagaagtggtttgtggaactattcgtttatttacttgcttattcttttattccttcctttaccgcatacctggcattgtcctaggggctgatgtggactcatgggcatcatgcttagaaagggaccttgttcttggggttttatgtttaagcatcaccatcttcttgagactcttaatcattttatttttgaatctgtgttttctgagtgaagtcccagaaggtagtggggtatatgctaggggctcagagaatttgccagtgccttctgcctccctgacatagattctaacccacttgttctcctcaccctcccaccatggcagaggcctgggcacaaccacagggagagttggggttgggtacacatgccctgtattccaggtcacagagtaaggaccctgggtacctgggaggatctgtacttgctgcatagtcaggaagtaactatgtaagtatcatattaaataagaaatactatgacaggttgagagaaagagaggagagcattagtgagcttacagacaaacaggaaaagcttttctcttgccttttgaacaagtgcctgcattttcatttgtactggaccctggaaattatgtagctggccctgactaggggtatagtgggaaaccaaaggggcagggatacagctgtggcagcagaggtggggtcgggggaaacagcaaacaacagacaataaacaagatgatttcagaaagtcataagtactatgactttctgagaatcaaatgaggtgatatgctggtgagtccctgagtatggtgcaggaagcatgttaccttaaagaaagatgatgagggaaccgttgctgagaaggtggcatttgagtggacatctgcaggaggtaaagaggttaggccgttccaggaatatggggcagtttctaggcagaataatgtgctaggtcaaaatccttggggctggaacaagcttgaaatagccaagagctagacacaaaagccagtgctgcagtagcctagagactgtggaagagaggaggcttggggcatttactaaggtaagatgaagctgatcctttattttattttattgttctttttttagaattaggttcttgctgtgtcacccaggctagagtgcagtggtgggatcatggctcactgcagcctcaaactcctggatcaagcaatcctcccactttagccttctgagtagctgggactacaggcgtgtgtcaccactcctggctaatttttaatctttttttgtagaggtagggtctaggtatgttgcactggctggtctccaacttctggccccaggcaatcctcccgccttgatcaccataagtgctgggattacaggcaggagccactgtgcatggtccagctggttctttaacaccaacaccatactggccatagtgaggacacagcttgcctctgggcttgtctaggtctgtagtccagtattttcacacctaagaattactaaggagggattttacagcaatgcgctccctgcattttctaccttaatttaattcctttttctttgtcaacatagctattctgcattctttaaaatagagattttttcagagacatgtaacttacaaggatgtaaataatcataggtgggccaaggaatgtgtagttcctagggagagctttgcaaatgagattggttcctttcccacagaacctcaaggactgttggatttgtttcagaggtcacaaatgggcaccttatggcccaaactggagccccagaagtgttttatttgttctgcatgttgcccttcatcaaacaggagtgccccagcaatggccctgtgctccccagatagctctgtcctaatctctcctatagtctcctgcttgtgcttcttccctttatgcctgaactctttttaattgtttctcattaaaaaaattatactccactgtatagtgcagacgtggaaatgttggcatgtggatagaccctgtaccaaaaacccagcagaagattcagagtccctgagatgcttcctcctcatcttcttcgccaagcacctcttgtcactgatcttggaagttagaggtgggaaaaggcaggtaagagggccaagaagtcaaagtcctaattcatgcatgcctgggcccacccgtcttcccgtcttgcatgcccattctgtggactccctatatgtagatgctaacccaggaaacccctcagggccagtggtgcatggctggctcccttcctacagactgttcctttaaaaatttggggctttaactgagaagaaaattaagtaattttgttattttttccttcataaagctaaaattattaatcttcagagataagtactgttcagtgcataatgagttcgaattgttgataattataattttgaagagtttcagcttgctgtcagccaagtaattaaaggggtgggaccagggttctattttgttcatgatggttatgcttctggtaagaactctctctgtgtggcaaaaatgccctcattctagtcacatggtgcagtgaaagggttaattaaatcaagtaaagtaatccactgggttgtgaagagttctcttttcctagtttcccccctggccttccatctcttccttaagatcttcccattgtcttagcaaagctggacaccctcaatggtgcccgctctccactagtgaaacagatgcaggatgcctgggtcctgcctgagcccagggaagaggctcagttcctttccctctttcgcaactgcccccttcacccaattgcccatgagtcaccttaaaaaaaaatgtcttgcatatactagcactggactaaaaaaattgaaccaaaagaaaagaggaagagaaaatggaaaactaatgattcaagaaatcacatagcacgagataattctattttgaaatcacagcagtggcacccagaggcggacactccccaaattactagtgaaaaccctttgatgtatccagttgtaagaaagcccaaggcacttttttattattattatgagtgtttcacattccccaaaagaaacatttagcagtaatttttaaatgtctgtgtgtgagcaagctaaataaaatgaaataaaataaaataaatccctaaaaaatctccaaccctaaatgtgcttacttgatggctggcttttacttacaataaaagccaaggtcttacaatggtgtatgaggcccccatgagatctctctgccctcatctgcccctttatcttccctggctcattccactatagccacactggctcgctagctgttcagggacacactgggtgtgttccctgctcagtctgttcccttgctatattcccagcctggatgctctttcctgggtatatgaatggctcaatcgtttctttccttgagctgtttcctccaaagtctccttctcattgaagcgttcccttgccatgctgtataaaacctcaacttcccacttttgacactcttaaagggactttgcagatgtgattaagttaaggaacttgagatggagagattatcctggaccatgtgggtgggcccggtatgaaaacaaaaatccttataaaaaggaaacagcagggatacaaacagggaaaggagatgttacaacagaaatagaagttggagtgatgtaagttgaagatgaaggaagggtccacaagccaagaaatgcaggcagcctctagaaactggaaaggcaaaaggaaatgatttttttctggggccttcagcagtaaccagagcagttgacacctagatgttattagctcggtgagaccctttttggacttctgatctccagactgtaagataataaatctgtgttgttttaagccactgagtttaatttgttacaacagcaataaaaaactaatacaattggcaggacccagactcataagaccccaaagaatttgaccatcttggtccccggttcttctgtgcaatattcaaagtttctattttctgtcaggatttcctttctgacttgaagacagaggaaagaaacctttgcagtacatgcattctggtctccttttgtacctgaggccagctttcgtcactaggtgcaataaacgctgcattagattttgatgggaggtatggtgcccaggtgtgtttcaacacagttcagatgagggacaggggagctggggagaagcaaatgcagccctgccaggaacagtgcgctgctgtttatacaacagggtaaaggaccagacttgtcattattttaacccaagtagacagttctcgcctgtctaaggatgtgattgactggtggtatcttttcatggttatgcagcagattgaacttcagaagtcagagctcacaactgacgggatgtgtttgtaattggacctggtaagaactggacctctaaatagggaagaaagagcagtggagacaatcacattgtggccttttgctagttattcattcatagagttcttcctgttttaattctggaggattaaaacattaaagaataatttattcctatactctcctcagcccccgtgcgttcctttttccttttctgtgtctcttgttttatctttctctctctgtgtcatacttttccctgaccttccatttcctgaaaattgtctgtatttgtgagggtaaccttagtgcttgaaactttttccagctttattttaaaaagatgaccattttatcaggcagtctgaaaatccaaaagtattctctgctccaaatgtcctcttatttaactggccagcgaggaaaacccacaaattgccaaacaagaggaacaacaggaagcggtgatggagctcatttacatctgcatatgttctttatttaaaaccaggggaagtgctgagtggatgggtttgggaaatatggccggcattccggaaagggtggctgtgcacaagtccacacatcctgtactaacaggcggaaagggaacatcatggcatttatgtttccgtgccatcttttaatgtctgttctgtggcatcttcattagatcccaacatgacccacaaactgttaacatatcaaaggcagtagggagagaggtgtgaatatcctaaaagggcttctgatgaactatcgtattttcttatactctaaatacatggaacagagatgttgggataggtacacatttgggttttattaacaaaatagcagtaagatgtataggcagttggagatacccgttgagcctctatgttctaaagacaaatgttccagcctctcatggtcttttggtggcacaaaatgtttcctcctgaagaggtgaaaaggtgaccacagtggtccttctcactttgctctgcctctgtggctgtcatgggagtagagttggctatgacatctgccctgcattgatacacaaggctgattcagggtgggttgtcaggtgtcctttcattcatcatgaccctgagtatgtcccttctgaaaggaggcatacatggtgaaaaaaggggccttccctggagcagatttgtgaagcaaaacatgaaaccttattattggtccatagaatgagcccgagaggcccttgagatggtctttgatcctactcatattttaaggtagaaaaacttcaaagttttaaaaaaactcagaaaggctggaataattgttccagatctcagtacagttgagctacagttcactcagtcatctttcccacttcagaatctgcccattcgtgcaacctttgatccctccatccacccacaaacatttgttgaatgcccataaataagatccagtccatgcctcaaaaagctcatatgcacaggaaggatgggaatgtagggctgtggactaggtgttacgcagagatgtggcagctgaagggtgcacagaacagggagtgtgcacatcagcctgggctctgtggtggagagtggaggaaggcagggagtgatactcaaagttgcggatatgtcttaagagaaaaatagttgtttgccaggtgctccatatgtgggaagactctgtcctatcctatttctatttgcttttaaataataataacaaacaaaatttctattgtttcattgattctctcattcactcaaaatttgagggcctgagatacccagaggagttggaacacacaatctgtactcacgtggggacttgcaaaataatgaataaattaatgttctagaagttactgggaccagttttcatccaatgcaagaataacttctaagttcttctcaaccttgagatttgatgaattagaataacgaacctttgtctcgttatctcatgcaactcacaacaaccctgtaaaatagattttatgatcactgtcagttttataggtaagtaaaaagagacacaggaggggttaagaaatatgcacaagatttcatagccaaagggtgaccacatgagagccaaaactgtctgctatccttaaatcctaggttatttcttttgcattactttgtgttgcttatatatagttgaactcaataaatgacttcatataggtagggcaatttcttcatttaactacacttaataggagaccaaattagaacatttgttttgaattaaaatatgatctttaagacattcctattaagaagggcagtatgttaaacatagagttttagattatcagagctggaccttgtacaaggagataataactctcaatacaattatgtcattttctgccatattacagatgagagagaacacagttttaaaatcatagccaagaacgcaagtttccctactcctcccagtgttatctcaactaacacttactgctttttattatattcagcacctgtaaggatcataacccaaagaaaggaaaatgcagaacaattgggttttgatgagagtctgagcttcagaagggtttggaacatacaatgaaatttctcattccgtggttatttgagtgttgggatgaggacaccagcgcacaactgtggtaatgtctgtggtcaacagagagcaccaggtactagctggatttggtggagcccaagtagaactagacagagggccttgaatggtcatctaactatataaaacactcacctttgattaggtctgctctctagtcataattctgacctctgtggagtttacttaaaagcataattctcattgattatgtaccgagaattatgttctcataattctcattgattctgtaaggaaatgtcctatgcacatggttctagaaatataaattactcctgtcaatatttaaccaaaaaccagacttggtccttcaggtgccagggcagagattgctcatttatattgatgtgattttcactaaataagagctgtaatgtttgaggatcaaactgtccagtttttgaaattagctgctttttgaaatttcctctgaagtttgcctttttcattttcccttttgtttttctgctggtttcttctttctcctccaaagccgcaggactcctgctacattgctcaattctactttccacctccactgctgggcaatttcttccttcctcactcccgggaagaaataattctcctcttgacagctttcctttggtggtttgcatactcccctcatgtagtagtcacattataaacatgcacagatggcttcggaaccctgggcttattttctccctattgtggtacaaggcatttagcacctggtaggagctcaaaaaatattttaggaatgaatgaatgatggaagcaaacaaagaaggaatatttgcctctcattactaccatctggagactccaaggaggccctatggttcagtctactttctttcagtttaccactttgtgtcacttgtccaggtgattttaaataaacattcattcattcattctgtctctctctacaagaggatggacacgtaccacactcaataatggtgagattgtcagtgattttcgtactcttttcctttgagctttttggtagtttgacatttttctgcaatgagaatattttattttgtagttcaaaagtattagcccttttatgcccagtgttccattattggaatgctaagcttgtgggagttatttatatcctactactcaaggtcattgccaaggtctgattttttgtatacaaaaatagcaacctctggcacaaatgagttaacattagatttttaaaattatattttgtattctaaaaatgtttattttataaaatttagacaattagtaatattgggagaaaaaaactacccataattctgatacccacaatccattgctaacccgttcactttacttctagcctttttttagtgcatacattttgatatgtagttgtgatcctgttgaaaattgacatttttattttactttttcaatgaacatgtataaagtggttttatgttatatatctccatgaatttcacttttattgactgcatgctagtctttttaaatattaatatcaagtgcatggtcaactttagcatttcccaatatgtaatagcaacactaaagtgagcatttattaaatgcttgctacttactgggcagtgtccagaataaactggtaggcaaaatgaacttctgctctcccagaggatagaatctacaaaaacaaatttatgctagcgactcaatatggtaacagctttatagtgaacatgcagagttatgggaacatttgaaggaatgtagaatccaattttaagcaaggattagggaagtcttcctggaagaggtaacattgaagcctcgacaaccgtatcacaactgaccagggagaaatgtgagaagagttcaccttgggggaacagcatgtataatgggccagagggcagaggcatggaatgttgaaggcacggaattgtagtttggccagagatcattgtgggaggggatagagagagaaaaaggagagtaaggaggtgatcgaggagctaatagcggaggtgcatggggtaagatcatgaagaactttacatgcaaatttaaagagtagggattatgtcatagaggcttggaaaaatcactttctttcttttttttttttttttttttttttttttgagatagggtctcactctgtgacccaggctggagtgcagtggtgcaaccatggctcgctgcagtatcaacctcttggtctcaagtgatcctcccatctcagcatcctaagtagctgggactataggcacataccaacatgcctggctaggtttcaaattttttgtagagacagagttttgccatgttgcccaggctagtcttgaactcctaggcttaagcaatcctcctgccttggcttcccaaagtgctgggattataggcatgagccaccgtggcccagcccccatcaagaagctttaggctggagaagctgaaagattacattggcttattacaaagatcattctggctgggagtggctcacacctataatcccagcactttgggaggccaaggggggtggatcacttgaagtcaggagtttgagaccagcctggccaacatggtgaaaccctgtctctactaaatgtacaaaaattatccaggcatggtggtgagcgcctgtaatcccagcaggctgaggtaggataattgcttgaaccctggaggcagaggctgcagtgagccgagatcgcaccattgcactccagcctgggcaacagagcgagactccatctccaaaacaaaacaaaacaccagaaagatcattctggctgccatccacagatatatgcagggagaccatagagggggttggagcaagagatgcaattcatgcaagagatgtttgtcatttacctgttgttgtttttatttcaccatcataataaccatgagaggaaatttttatgcatagctatcttgagtactattttattagaaaagaataaaaggaaaatgcgagctgatcttagtgttacaacttgtcagcgtcacttgcaggctgagtttgttctcatgcccacctaccaagtcatttcagtagtacctgttggagatgcgtaaagggcaccttcttgaggatggctctccatagtatacgtggttcagaccagatttcatccagatttatgctgcatcatttgctgggatctcaacttccactctaagcctagtgccagttctgtacaaatgatttttaaaaatccaacataattaggatgattatatacaccttacagccatgtttcatggactccctgggtggaatgcatttgcctaaggtcaacgacattatttccctaaagggacagtcctattgttggacttcagataaattcctcactatttttcaagtgctccagtttatatgattccactttcttggccaaaattctgcttatggcatagtgttgcccattgtgggatctcaaagcacattcattatcatgtgctgacggctgttctgcaggagtggaaaatggaggtagagagaagtgaatgcaacggtgccagcagtgggggatggagccacgcccctgacagggggcacagtctctgaactcagcaccaggctgggaagctttgccggggcctccctgtgctcttttggggcaggccactttggagacataacaaatataaccagggtagagctctgccagaaagcaacagcggggacagtgatggaaaacagatggaggcgctggccttcacttggtgagaaatccactgagggaatggagaatgtttgcaaaatctccgagtgctattgggacacctcttagtgcatttacaaggcgccagcctctgtttgccaatggtttagtttggttttgatgagaccaaattaccctttgaattctctcgaaattttgaacatttcccaaattttgtttgactcaccagctggaggcttggaattaaaaatccagcatgagtgcctgagaaaaataagtgaaatcttgccttattttggaggaatggttaagaaaaggtgcttgtagctgcctagcttgtggttggctccccacattgtgtaattcttagcctggaacaaatcttgagttgtcattttgtattttctcctgcttctacatagggagggagggctctgcctccccaaagtatttcggaaagatggtggactcttctgatgtaagacttcagaaaggaaggcacacaaccttatttgttcttctgattcatggataaagggttaaccatactgtggctttttgtagcacatgcagtttgaacatagctctatattcaacatcttgtggtgagaaggaaggacacaaaaaagagttcatctcctttctctgggggactctgccctttctaggtgagatgatggtgtatgactctaggaatatagataagtgtccttacatacaaagcagtatgattcgctgtctaggggaaagatacaggggaattgaatgaggaatgattctgcattcttagtctctaagatgttgaacctatacaatattcagtaagtagttttgattcttctgtgatgcccctatgcccacaaacatcctcccatcatctcagcctgaaaacaccattcctgcaatcttcctcctttccctctctcttgctctcatgccaccttctttgttttgctgctaaatgctaaaagaataatttagacttgttgcctttcctctctctctttcctgctctcccttccttctccacttcttcactcctagtcccctgacttccttcctcctctctggattacagctgttctcctggtcagcaatccaacctcctcttcacattctttgccttactgactctttggatgagtcctggtgattccagaaccctctgtctctgagcttttatgccactctctcgatgcttctcacatatctctatctgctccctttctcttcttctcacatcccttaattgtgaccttttttcaagattctgtctttgagccctttctttcttttcgacactcctagccaccatgggatctttagcatctctcctacatagatgcctccatttttagctttccagctctgacttttgcatgagccacatcacatctgtattagtctgttctcacactgctaataaagacatacccaagaccaggtaatgcacacagaaaaagaggtttaatggagtcaccgttctacctggctggggagacctcataatcattgaggagggcaaaaggcacatcttacatggcagcaagcaagaaagaatgaaagccaagtgaaaggggtaatcccttacaaaaccatcagatcccctgagacttactcactaccatgagaacagtatgggggaaactgaccccatgactcaattatctcccaccgggtccctcccacaacacatgggaatgatgggagttacagttcaagatgagatttgggtgaggacacagccaaaccatatcaccatctgattctcaaactaaaaaatagtataaaatttatctattttatttattgcatggtgttcctttttagaagaaagctccccaaaggcagggatgtctgtctgtgttgctgttctatcccaggggcctaaactagagcttggcacacagtattggctcaccaaatatgtgttgaactaatgaatgaatgttacctacatttattgagcacttgcctggtaaagaaaatttctaataagatgattatctcacatcatcctgacaaaatcctatgaggttagcccattcataatacaattttgcaaacaaggactgtgaaacaccaagaaggcaactctcctgaggccataaggccatatggctggtgagaggcagaatgtagacttcaaacccaggcagaatgacctaagcccaagctttcaagcactaggttgtacttggaggtgattgatctctgccattgactagctatatgaacttggacatgctttttaagttatctgagcttcagcttcctcatctagtgaaaggacattacctctgacttaacagtgttatatctaagaactttgcaaacagtaaaatacagcattaatgttattcctcaaataaggtatcactaatatttatgagaaaaattacatacaaactctattaggacttacagagccacaaaacaaaccagaaaccaaccaaacagcaacaaaaacaacaaaccacaaattatgaagttatggtgctatacttcaaggaatgcccatcctttctttttccctcccttccttccctctctcaaatatttattgcaaccctacaagtgctgggcctgggctagagataaaaggataaaaataattagttgagattaagaattagtaattagttgagattaagagattgatttatacttctgataagggaaagaataatgttgactggagttcttgtggaacgctgtcatgagagggcctggaaaaggagtttagaagactcaagcaacagagaaaaatggaagaactatattcctctgtgttctcctcttctgtgtgtaagatttgtaaccctgagaaaactggttgagccatggcttagctggctgcccgagtcatgggccccttaaaatcttcacttaggtccccatggatgccagagagggctttaaaggtgactgctagatcaccagcctagataagaaccaggggaatgggaaagtggctaggaaaggagactcatatttgaattggagatgtcaggatagtcaggcagaggcatctgcagttatgcagcagagtaagaagaaaaggagagcgaggcttcataagcacttggttctttggctgagggtctgaagaaatcctccaagacatgtggcatccgccacaactctttgcccacatccaggcccttccctcttgggagcctgtcagaggggaaaagcaagtggctccatgtgtctctgcctttgtggtaacttggcttctttgctggagggatcagttgagcatgtcttcaatacattggtctggggaccttctggttctctaaagctgacagatttctgctcctttttggacttcctaaggttccatttaagttttacagttaagggttgacataaagacatcagtccagagtctgaatcttctcctgccttgtttaagacctgctacaagggctttctgtccagaagagctttagttccatttggggaaaggtagataaagctgggtgctgtcatttttttttgagaagtagcttagtatggacacaagagctgtactctgagaataaggagtcttggattctagctcctgggtttgtttgtgtgacctggaatatgttctgtcccatacgttctaggcttcagtttcttccataaaaagtaggagttggactaaatggtatctaacaccagtttccatattaacattctctcatctttggctggggcgtgtatgtgtgtgtgtgtgtgtgtgcgtgtgtgtatacagatttttctggaaaagaaagattaaggatacgatcccatacacactatcatcaccatatgtgcgtgcattcctgacatggctatgggccccacccatgccatatgctccccacactttgtcagcctggctgtcctttattgcccatcatagctcagcctgccacatgttcctgtgcgcacgagatgcactgacacaggctttgtgaaggctgactccatgtcttgttctcctcgctgcttcttgaggaatcctaaatccagctgcaacctccacacttgcatggctttgtagaaggggaaatgtaagagtaggcttttaatcagctcacacatattttgtgaggcaaggtctgagagggctttgtgaagccgctattcactgcatcatgttgtgggatcaagcctacactttgtatcatatggaaacactgatagtgccagataaatactgagacttaggaagaagcatactgtacttccaaccatccaaatcgtggcagaacctgaggacaaagcattcaactaatatggcagaactctacaaggcaggactgggatggaagtttcggaaaggaaagatttgtgactctctgaaggtggttcacatgacccttgctgtggagggaaatggagtgccacctggaatcatgcttcccctgtcctgctgaggttcgtgtggatatgtgtcaaatatttttcagagattttaaagaaattaaaattaacacttgattcaaccctcagatctatcacttataatgcggcctcggacaggccatctaacttctttaagcttttttgtcctaatctttagaataatatattacctactatgctgccttttttcccaggttagttatgaaattcaaagaagatgatgtttgtaaaagcaatttgtaaacaataaattaaccagtggttatgtgctcaacactgtggagcctttcactccaaataaaaacaaatcaaaacaaaaaccacctccatggatatataggcaattttgacatgtaacttctaagggtctgcttaacaggctcatgtgtcagaatttgacaatccatgaaatagagatcaagtagtcgtaataatatcactgccttcatggcagaggctgcatatctgtttctcctattccacttcatctccccagtgctcacacatacaccctgttggtttgtagttagtgaatgattaaggaaatgtgcgtgtgcctgtgtgtgcttgtatgttgtataggtgtgtctgcactgcccattcttgcatttctatcttttaactgttatggatgtataagcactatctatgatggacgaggcatagtgcatctcctaggccggaaatgtttcactcactaatgagctggacaattctactctgtgaatttaactttcctgactcccttatgcaggttaattttggtaacatatcatattttactctggcttggtgggattaggtgggaaattacagattgcatcaacaatttggtctgcctggatacaatttggtctgtttcagtcacagcctgggtcacacctgttgatatatatttttaaactgattcctctctagatcattctttctgatcagcacaaggcaatatgctgaaatttctcttttatatctgttttattagcatgtctttcaagtgctccttaatcttccaaagaaaatggaaagagttcttatattgtgctacagcctttgtattcacttggcaattgccaacttattttaaaataaacttttaaagtgaactatgacgtatctatacaatatgcacaaatcatagtatacaactttatgaattatcatgagctgtcaccacccagacaaaaaaaaaaatactggcaatggcccctgccccccacaaactctctcatatcgcaccctaggcactacttcttcctccataaaggtagccaacattcagacatcatattctatggattagttttgattacttttaaattttctataaatggaagagtgaagtatgtatatttggggatttttgttgttgttgttcaatgttaaacagtattccaaaatattggagttcaatgtattagtctttttccttatggttagtatttttgaagtcctgtctaagcaacatttgtctactcaaaggtcatgacggtattatcctgtgttatcctttagaagtgttgtattttacattcacatttagaactacagtacacctaacatttttatatggtgtgtagtaagggggtcagtaattattttttcataaggatatctgaaaagacctgacattcctcactgcttttttcataaatcaattgtcttcatatatgtgaagttgtcttggactctctattctgtcccattagtattcttgtctcttctgggtcaatgcccttatctgtcaatgactacagttttataataatgtctaatatctagtcatgtatcaaaaccatattggctatccttggctctttgaatctccatacaagttttagaatcatatgtgtcctaataataacaacaacaatgaaaaaagatgatattttgattgggattattttgaatttataggccaatttgtgaaggattgatatgtttgcaatgtgacatcttctaattcatgaccatgggaatgttcttccacttatttaggtcttctttagttaactcaataataatttttagtttttcttgtgtgtgtgtgtgtgtgtgtgtatgcatgcatgtgtgtggcagtcttgtacatatttcattatatttatatgtatatgatttttcaaaatagtatggtaatatgatttacttattttttgatgctagtatataaagattgaaataattctcatatgtttattttgaagccagaaaccttgctaaattcacttatttattctaagagtttctagagtttttggttttctgtacacaaatctccctgtaataatttttttctttatacctattccttttatttcatttcttatcttatagaattggccatgacctctagtacaatattgaacataaatggtcttgaaagatacccttgtctcattttcaatctcagcttttaattttattatgtctaatgagtgctatagaactgttatcattatcctttatcaattagaaaaggcatcttttcttttgttatgagttttcaacatcaatgggtattgaattttgtcaaatattaaatattttgtgcctctgtagaggtgatcatttgcttttctcctttattatattaatgtgatgaattacattgatcattttttaaaatagactttattttaggaagaagtttcaggttcaaagcaaatttggacagaaaatagagtaacttcccagatactccctgccttgacacttggacagcctttcacacgatcagcatctcacaccaaagtggtacatttgttacaattgattaatctacattaacacattattatcacccaaagtccatggttgacatcagggttcactcttagtggtgtatattctatgggttttcatagatatgaaattacatgtttccactattagagcatcatacagaatagtttcactgccctgaaaatcttttttgcttcacctattctatccctccctcctaactattccctggtaaccactgatctttttattgtctccatagtttttccttttccataatgtaatataaatggaatcatacagcatgtatccttttcaaattagctttttttcagttggtaatatgcatttaagtttcctccatgtcatgttatcacttgatagcatgtttccttttagtgctgaataacattcattgtctggatgtaccacaatatatttatccattcacctacttcaattttgacaattgtttataaatctgccgtaaacatctgtgtgcaggtttttgtgtggatgtaagttttcaattcattgggtgaataccagggagtgtggttgctggatggtatggaaagagtatctcttgtaagaaactgccagattattttccataatggctgtaccattttgcattcccaccagcagttattgagcattccttacttattttccacctgtatatcttctttgataaagtgtctgttcaggtcttttatccatttttaaaattgggttgttcatttggttattattgagttttaagtgttttgtatattttcgataacagtcttttatctattgtttggaaatattttctcccagtcttttaaacattaaagcaacttgcagtcctgaaacttacccaactttattgtgttatgtgaatacacattgccacatatatgaacacaaaattgaactgttaatattttgtttatggattttgaatctgtgtttatgacaaagattgtcctagaatttttctttctggtaatgctcttattaaatgtcagtataaaattttactaccctcataaaagaagttgaggaattttcttgttttttctattctttggaagagttcatttaatattggtgttatttctttcttatgtatttggaaaaattcatggctaaactgtctaggcctggagttttctttgtggtaaggcatttaattacagatttaatttctttaagatatatgactattctattctttattatacctgttttgttgtatttttaaaagatttttaaaaattgatttaaatgtcaaatttatttgcataaaattgttcctagtatccttttatctatttttcaggtactatattgatactccccatttcttttctgatattgtaatttggtaccttttctattttactcttgagcagtctcattcctacccccatcccagaaattataattttataagtcttaaaaaagttttggctttgttggctgttttaatgtacatttattaatttcatttattttctgtttttactgtttccttcattccagtttgttggttttattttctgttccttaatttcttaggatgaataattagatcactgatgttaggctttcttcttttctaatatatgcatttattgatatatatgtctctaagcgtggctttagctgtatcctacatttttttatgacatactttcatagtcattcaattcaagatcttttctaatttctatgctgatttttttgactgttgagatatttagaagtatgtagcttaatttcccagcacttaagtgtttcttagttatcttttgttaataatttacaggtaatttcattccggtcagagaatatacttggcacaatttctgccttttcaaatttcctgatacttgctttatagcctggaatatgtttaatttgggtgaatgttctctgttgtgcaatgtctttagtcctcacgtgcagtattcttcatttgcgtgtgtgtatatacatgtgcgtatgatcaagtttgaagattgttaattatatttttcaaatcttttatttaattcctttttgttatctgcttcttttacttactgagagaagtatgctaaaacctcccactatgattgtgaaattctcctttttgtcccctatagttctgttgatttttgtttcatgtgtttttgaacttatacatttagaatttctacatcttcctgaacaaccacctcttttgtcattatgaaatattttccctttatttttagttatggtccttgtcttaaagtttagtttatttggtatttgtaaacatacactttctcttatggctagtatttgctttgtgtagtttcttttcacttctctactctcaaattctctgaaggcttttatttaaaatatgtttcttgtaagcagtatattactttgaaatccattatgaaaaccttccttttaatggtgatatatagactatttaacaattaatatagtgacatcttaactaacatttaatatagcttccttgtgacacagccgccctttttctaatagtctcaattatgtctcatttgttaaatataccaattaaattattagtttaagctatcgtatgtttcggccttgaatttttatttgactctgttgtatagttgtcatttcttttctaaattccttcatttgctgttttgcatctttagaatatatgtgattgatatgttccagtccgtggctaataactccaatatccatttcttttgtagcttgttatctcttattgattgatggtttggatctttgggcatttggttttgtctcttcgtatgccacatgatatttcatacttgacactgagtacaaaaattataggaaaaaacttgaggctctgaataatgttatattccttcagagaagacatattttgtttctgggaggaaggtctggtgggggaagattgccttagtccagttagggatttattccatgggaaactgggctgcagacttggtgaggacagatctatttccagttgcccttccacctgtgatgtagtttttcagggtcctcgctgaaagtctgggatgtctacctggaccccttctccttggcatatcttcagtctaattttgtccaccaagacttataagactgtgaagtttggttcagctactcagcctcttcattgcaggttgagaattgaaaattgcttcatgagagacagtagcactgaatgtgggactcaggtctccacacgctcactctccccaagatcttatcctctcaggtcgtcactgccttagtaactcactgaggccctgacgtaagattttctacacatatttagctcagcatttttagtttttctcagtgggagcattggtcttcagccagctagtctatctacttcactctcactctcatcaaattattttattcacactttacagatcttgaatttgaggctaaatcatccacattacaaagacagaaacccagccccgccatgctctcctcagtctgtctaatcataagacataaaaagctaagcctctttctactcaggcccctatttcatgtctcattctagggtcagttgtcaaagaaatcttgataagaaagtattaattcttaaggggaagctcttcctcatggataactgcattttattaatagagctgttttgaaggcctacagcctttgatggaaataactattttggaagaatagaagtgaaaggtttgctgttgtttgcttgggtctcagtaatacccctggggcatctacccctacacatacagccaactttgcctttgaatctcccctctccatctgaagtctttgttctttccaatggatttatagcaatttacttcctcatgaaaaaagaacttgcattcctgaatctctgcaatgaactgaagaagctaactgtacaactcaatcctgcccacaagtgggcaaaccaacaaaaccctttgagaaagttatatcctattttatctaataatggtcaagatgcaaaagacgtgaatgtcctcttttatagcaaggacaaaaaactccacgaagatgagtgtatttaaaaaacaaaattgaggccaggcgtagtggcacatgcctgtaatcccagcactttgggaggctgacgcaggcagatcgcttgagtccaggagtttgaagccagactgagtaacatggcaaaaccctgcctctacaaaaaatgtaaaaattagccgagtgtgatggtgcacacctcagtcccagctacttgtgaggctgaggtgggaggatcgcttcagcccaggagatcgaggctgcagtgagccatgattgtgcctctacactccagcctaggcaacagagtgagactctgtctcaaaaatagtaataaaataaaataaaataaagctgcttattagttgtttgacctagacataaattcatttaacttaccatagccttgatttcttctctgacaaaatgggcatagcaatcataccctttcataaggttgttggctgggttgtatgaagtcattcatgtgattattgattaattgagtgatttttcagatttcacaagagtttgaaataaaataattaaaaattaataaattttgttataaagggaatggcactgtttcaaacttagctgctgctattgctgctgtttggtaataaattctagtccccttttgacttcgatcaaaatctgatgccctaactcagctagaatgagttttcccattgcccatgtgtctatttttgttaaacggtggaccctaatcaaccgaggaggtgtttgttatagaaaaccaatgactaggaatcaccttctcagatacagaatatgaggccccaaggggtgaggggaggtgtccatggttactagacctgggggtctcctgacttctaggctgcgagggaaaatatcacagagtatgctctgattcctagagggccagaggggctcctttgtgatcccaagttctggttcaccttctatatggagttgtgttctggtcttaagggacttacccttccattccatcactttctgccatcaaaactttcctttctgttttctaagacaatatcaatggctgtggatattgaacaattgtctgataaaagtgatttttgacattaaggatctaagtgctcatatttgagagtctgatctagtgaccctcatgaataacaatcacaccttacttagtactgggattttccctttacagttgatgtttacttacatgattgacctgcgtaacagtttaaaacaggtaggaccacgaggtcaggagattgagaccatcctgacaaatatggtgaaaccctgtctctactaaaaatacaaaaaaaacaaaaaaattagtcaggcgtggtggcaggcacctgtagtcccagctacttgggaggctgaggcaggagaattgcgtgaacctgggaggctgagcttgcagtgagccaagatcgtgccactgcactccagcctgggccacagagcaagactccatctcaaaaaacaaaaacaaaaacaaaaacaggtaggaccacaacagtaacaataactgccattcatcaagtgtattttgtttgcaaaaatatcttcactttcatttcttatttaattcatatgctaatccttcaaagtgggtgatatcattacccatttaataaaatggcaattgcagctcagaaggcaaagaatgtgctcaggatcataaagccagtaagtgatgtagagagattttcaacccagtttgttgattaggcaaaacagtagtcttttcacggcaccttactgtctttcccaagttatttctccaacctgtacagagagattgtgccttgactaaaaagcgccagcaagtttatgatgggtggttgagtcaggagtagagttttaatcttctaaaccttaacccatctctctttctattgaccatacacttttctccccattagcatctcagcttttagaaatggacattttgtgaacctccccattgcattgcatctcagttgttgtatttgagatgctggaacgtggagatgcaatgcagtgaactcaacaatccaaaatagccaatccaaaattttggtgtctaaagagttaccatttccactataacagatcgccatcaaatttacttaatgtcaatatcacattatgtacactttaatttccaactcagaaaaaaaggtctagatctgtttgtggctttattaccaatgtcaccattatttttgagccattagtataaggagttcagatgtttgagttcctagagtattaaataagagagaatttagacaaccttaattttttttctttttttttcttttttaaccattgtcatgagacagactcaagttcaaatcccaactcagtcatttattgattgtgtggacttggccaagttgcttaacctctgcgtctcaatttcttaacttttaaaatggagataaaatctaccttgaaggattataaggaagaaaggttatttgtaggcagtacttggcatgcaaaagctataacttactaataataattattattttatttatttatttatttttcatatatattttttattatactttaagttctagggtacatgtgcacaatgttcaagtttgttacatatgtatacatgtgtcatgttggtgtgctgcacccattaacttgtcatttacattaggtgtatctcctaatgctatcccttccccctccctccaccccacaacgggcgctggtgtgtgatgttccccttcctgtgtccaagtgttctcattgttcagttcccacctatgagtgagaacatgcagtgtttggttttttgtccttgtgatattttgctgagaatgatggtttccagcttcatccatgtccctacaaaggacatgaactcatcatttttatggctgcatagtattccatggtgtatatgtgccacgttttcttaatccagtctatcattgttggacatttgggttggttccaagtctttgctattgtgagtagtgccgcaaataaacatacgtgtgcatgtgtctttatagcagcatgatttatattcctttgggtatatagccagtaatgggatggctgggtcaaatggtatttctagttctagatccctgcagaatcaccacactgacttccacaatggttgaactagttttcagtcccatcaacagtttaaagtgttcctatttctccacatcctctccagcacctgttgtttcctgactttttaatgatcgctattctaactggtgtgagatgatatctcattgtggttttgatttgcatttctctgatggccagtgatgatgagcattttttcatgtgtctgttggctgcataaatgtcttcttttgagaagtgtctgttcatatccttcacccactttttgatggagttgtttgtttttttcttgtaaatttgttggagttcattgtagattctggatattagccctttgtcagatgagtagattgcaaaaattttctcccattctgtaggttgcctgttcactctgatggtagtttgttttgctgtgcagaagctcttgagtttaattagatcccatttgtcaattttggcttttgttgccattgcttttggtgttttagacatgaagtccttggccatacctatgtcctgaatggtattacctgggttttcttctagggtttttatggttttaggtctaacatttaagtctttaatccatcttgaattaatttttgcataaggtgtaaggaagggatctagtttcagctttctacatatggctagccagttttcccaggaccatttgttaaatagggaatcctttccccatttcttgttttttgtcaggtttgtcaaagatcagagagttgtagatgtgtggtattatttctgagggctgtgttctgttccattggtctgtgtctctgttttggtaccagtaccatgctgttttggttactgtagccttgtagtatagtttgaagtcaggtagcctgatgcctcctgctttgttcttttggcttaggattgacttggcgatgcggactcttttttggttccatatgaactttaaagtagttttttccaattctgtgaagaaagtcattggtagcttgatggggatggcattgaatttataaattaccttgggcagtatggccattttcacaattttattcttcctatccatgagcatggaatattcttccatttgtttgtatcctcttttatttcattgagcagtggtttgtagttctccttgaagaggtccttcacatcccttgtaagttggattcctaggtattttattctctttgaagcaattgtgaatgggagttcactcatgatttggctctctgtttgtctgttattggtgtataagaatgcttgtgatttttgcacattgattttgtatcttgagactttgctgaagttgcttatcagcttaatgagattttgggctgagacgatggggttttctagatatacaatgatgtcatctgcaaacagggacaattagacttcctcttttcctaattgaatgccctttatttccttctcctgcctgattgccctggccagaacctccaacactatgttgaataggagtggtgagagagggcatccctgtcttgtgcccgttttcaaagggaatgcttccagtttttgcccattcagtatgatattggctgtgggtttgtcataaatagctcttattattttgagataagtcccatcaatacctaatttattgagagtttttagtatgaaggactgttgaattttgtcaaaggccttttctgcatctattgagataatcatgtggtgtttgtctttggttctgtttatatgctggattatgtctattgatttgcatatgttgaaccagccttgcatcccagggatgaagcccagttgatcatggtggatacgctttttgatgtgctcctggattcggtttgccagtattttattgaggatttttgcatcaatgttcatcagggatattggtctaaaattctctttttttttgttgtgtctctgccaggctttggacaaccttaatttcttattatgctcactacttcttgtggctgagccaaaacactcatgctacaagactaaatcagtttctggagtttagaagtctttagtgctttcttctactttattgaattagttcttcattgagagagagagagcatatctaggaggagccagcctgtcttggattgtagtgatattttgaatggttcctttacttgtttttgaaagctcataaacccctgttaagtagactaggtgtccagaccttcatccttgatgctggctcaggcccatctgtggagattgacatggctttaacttcatgatgaagttaatttcatcttttaacttcatgatgaagttaatttcatcatttaacttcatgagctatagacccatcatagatccatcgatccagttttccttccaggccccacattaactgtgccaagaccagaaaacacagagacttggcctagacttttttcttggatactcctttcttgtgagattgccactggagctcagcatcttggcctctccctatgagatacagtgggggtgaatgaggagggtaaaccggctgaggatgcaaaaaagagaatgactcactagctgtgcatcttagcaaggcatggaacttctagcacgtggctgctggcaaaagctcaaataactgtatatctgaacaaagaaaccatattcaggactgctaaatcccagcaacttaaggctctgccaggcaaagcaagagaaagaaaggggaaggatttgagaaggggttaattgagggtgaggtaaagaagttttactctgttatcatgttgaccaatttgtatccatttgcctttctcctttgagtcattgtcatttcagttgctgagaagtggactgaaaccttgctgttagatgaggaaataaccctgccaattatacacacacacacacacaaacacacacacacacacattccccacactggcatgccactgcctttttcaagataggaggaatcccttaactagttatttcatcatgcatgaaaaaccccaaagtaaaaatgttggagaattaacaaaaaaaaaaaagttacagccgccaagccaatgttgcattattttctcaaaaactcatgatgtcatggacttagctcacctttagtgcagccatgcgaataatgtgtactgagctttctatcatgtaccattataattagctctgtcaggtcttagccctgcaaccctcatgcagataatatgataatatgtcttcataaccaagtgaccttacatgcacaatatttctccccttatgaagattgcatgtcaataaagtaattgagtctcagaggctgcagcgagggaagatttaggtgattggacgtggagagcagtgatgtatgatgattattattcctcttgtcagggaggcgcgtacaagcgaggatggccagaagatgacagggatgacgggttgcgtttcattaaaaaaaaaattgctgttaatcaccactctattcttttcaaagtcactgaggaaagaaactcttttttcattgtagctacaatgaacatccccaaatgggagcacatcgtaagatttttagcctcagtcccctttcacagtgtctttcttctgttgcaaagaggctaaattaagattttaattaatagatcagccatgggggcctgggcaggggccacccagcttccctgctgtagggctccttgggtttccaaatgcagaaaaggcgcctgccgagatggaattgcacttcctctcctctctgcgttgagagaagtgtgctggtgagctctataaaaagaaagcaaatgtgagagaaccagatccgagacaactatttttacttgaattaatttgtttggacagttttaacacttggaacatttatatttccatactttataaaagcaaacatgctgtttctctagctgtaaatttatcttatgatatcataacagctggaaacttgtagcctggtaggattttgtttcatatttaaacagcttgagaaatatgtcggaaacaaggtatattttcccccatctctgtgtgttttctcctctcgtattaggctaccttaggagtgtcggcagtatcattcagaagatactgaggctccaggatttttattagcctggcattgttaattgctgctcccttgcaaacctcttcctataaatgctgagaacacactggagccccttccagaggagttcaagaatcttttcaaggggaaagaaagctaacagtaaaagcatcttttgttggcagaggggcttctgaagtctttaaatctttgttcataagtaattgactaagatctaacagccttgaaggaaaggagctgatggtatcactttttagtcatagtattaaccttgtgatttatggtacaaaattagccactgcatcctctcattacgggtgctgagtgatttctccaggcaggcaggagggaattgagagctggatttttgtctcctggagctctactgtttcctcctagggaaccacagtgagtgtttttagggataggaatattgttttccttccattttctctgctctgtaaaagaaaatatcaaatgtaagtaaataaataacctaagggagctagaatgttcagaggaaatgttaacccaagggtggtccaagggtggcagtatagaatatagagtttcagatagggtcagtgagtgatttcaacctcctaattgtcccacaaccccctcctctgcctccacaaattcaaggccaaagctttctgagtattttttccattgaatagtatctggagtagagattatatccatttctccatctggatagttttttcctaatgaattaaaaaccacctaatagacttcagggacactaggaagactctgatgatttcaagaattcataatccttattctatgctgacattgaaattttacaagtggagctttatctctacagttcaaggctttggtttctggtgaaaaatatgtctctccctgggaggaagaagcagattaacctattatcagttatttacatctgggtggaaaaaaaagatctaaatattttctgaatgctttaagtagagaacaagcaagataataactaggtgcttggggagtgaatttacgtgtttgaggcgggctgatgcagagaggagcatggatgcgaacgggcccataactaggagctttttgctgttgaaaagcaactttgctgactgcacagtttgtgtgagccctcctacagctcagttctctcctcacatcagcctgcttccctgggtgacgacagtgttaaaagcacagacttcagagttagactgcataagttcaaatcacttctctactacttgcaaattctggggcttgagaaagtcactagtctcctgtatgtagctcagttttctcatttttaaaagtgacaataatggtgccttgctctagggcagttataaatgtaacatcctcataataaccaataataagagtataatcagtgctgcctgttgttattatcccagtggatgataacttagacctatgctggattcgttgtcattggtgatggtggtggtgctgtggatgataaagagatgatagatcctgatatggtttggttgtgtccccacctaattctcaacttgaattcccacatgttgtgggaggaacctggtgggaggtaattgaataatgggggtggtctcccgtgctgttcacatgatagcgaataagtttcacaagattttatggctttaaaaaacgggaatttccctgtacaagctcccttctcttgtctgctgccatgtgagacatgcctttcaccttctgccatgattgtgaggcctccccagccacgtgaaactgtaagtccaataaacctctttattttgtaaattgtccagtctcaggtatgtctttatcagcagtgtgaaaatggactaatacagatcctaaatatagcaagtgtactggtgcttaatttccctttgtaaaacttgagtcctggctgattatctccaaactttcccttgacttctttccctgtattttagttccagtgtgtataaaagtgaaagctgaactttctgaaatgtcgtgggtgtgggcctgggggtgctgctggtgtggtgctcctttactggctctgtcttgccatagatctccacagagccctgagctgtagggctgttgatgacaaaaagagaacataaaatgctagaggaaagatcattctaacacggtgcaaatccccaaaccttccctacaatttctctgtctcccatgcctcacccaaagcaacatttggcctagaagggaactttgagatgatctggccccatgcctttcacactgagctatgcggaattctagcattccaatgagacttgtcagaggtgcagggggaacaagtggtgacccatcagggtggagctaacagggctcccaaagctggcttccaaatccatttttatccattcaatacactggggtctaaaggaaaatatcatttaatgaaaaaattttattgtctaatgtaacaacagaaggttcaagcatcagtgatctagtccatcttgttcattttacagatgaggcgcagaataggcttatcactggctcatgtcactgccagttagtcatggaccctagccttgaaattgctctttggaaaccccactgtttccagtattgtgtctgcatagtggcttccacgggccgagggctcacctcattgccccctccccacatgccctagctggtctcttgaatgactatagcactagcatgtggtggccatgtgtgccaccagtgccaccaccctaatggcagctgtgattatcagcacagaggcccaggaagaaggacagaatggactgctggcggatgaattgggaggggagggaatgggcagaagtggagccacattgaactcagaagtataagtgaagaacccactataatgttgcatggggccttgttcagcaaaggaagattgctgtctcccagtccagtgcagctgaattaagtgatctggccagggtggcagtggggcctgtgttccttctcacaggtatctgtgttaatgggcacccctgcctggagccgccagtgtagctgcttggatttcttattcttttatttccatcctgtctccttgttttctgtcactgtgtcatgtcaaatcattgtcaggtggcagacaccacaccccccaagtacaaaggtatcaggtttcaggacacaggctgaaatgaatataataatgggagccagaacgaggcacagaccacttagcaggcaaggaaacagctaataagtgttgttagtggtttccatggggaggacctggcgtgcatttcttggacaggcaggtggagcacggcctgtcctggggtccagctacagacaggcttgtgcgattagtattgatgcctgtcactttgtggctgccaagctgttgattctgtgaaagaccaaagactctggttatctggtaatcaacactgctctcaggaacgcactggggaaacagaaataggctttcctgagtattgactgaagccatggatcatgttgctggtttgtgttttcctctagccccagccctgagattgctccagcctgttcttcacctgcagtgccaggtaaccattcttatttgtcatgggatcaaattctaaccctcttagagtgagcccatccaaatgctctgactcagctgaacactgatgtaaccagggtgacttgggcgacagcataggaaataagaatgcatttgcatgtcaaggtggaaattcagtctctcacctttgacaaattcccacacctttgacaaattcccaaatccaaatgcatggttgacgcttaggcttcttcttatcccactccacctcacctttgcttttttaaaggctctttaaaaatataaacattaaaatccaaaagggttagtaacagaagaataaaaaatataattcgttttctctcctaattcattttcttggtaactgttgccttctcatatcctcttctttctttcttttttgtattcaagaactttaatatcttatttttccaaaacatcaatgtcctgattatagtgaaccttgaacagacatctcctcctgcccatggaaaatgagttctgacttttcttgggttttgttaagttttaatctctttttttctctctctctttcttatttactctctctctctctctttaattttcttcctttctctcccctcctatctcttcactccctctttctctcccctttttctcccactccccttcccaaagctaaaaaatgctgaaacatgattgcttctttctttcttatgtaaggagcaatgggaactgaggttacacagaatgtgtcacaaactggatatcaccacttagctaacccataaatccacccacttacctacccacccatcagttcatccatccatgagtaccttaggccatccactcatccatctgtccatccatccattcattcatccatccatccaataagtgccactgagcatttaccattggccaggctctggcaagatgctcaggatacaacaataaatgagctttccatcttcaaagagctcaccatctagaaaaataaaaccagtgctggatggtaagtgatctgtgataaatggtatggatatatgtatgtgtgtgtgaatgtgtatacctacctgtacacgcacacactgccacccaaccattaagtgtctgcttggcttttgagttgtattcatttgtagattaatcaaacaactcttcattaatgccagtagccaggcactgtgttaggagttgggtttacagaggtaattaagatacagacccttcttattcttaagtttctcatgaaacacagcctggattatccttccctcccaccctgccacgtttctgccccataaactagaccattctctggtaatctacttagttttttagataaactaagaataatctatatgacatagtccttcccagtacttaaggaagggaaagtatcattgaatatatcacttgcaaaggagcttagagattatcggcccaagcacatctctttgtgaatgagaacactgaggctctggaggagatgaagtgacttctccaggccacacaggaaggcattggcagaactataacttggccttgccaagatgtggcctttcagtccttcccaatgttctcaccccaagtttctctttcatgaggccccagaagctgcttagattcagacaggccactagaggctgatgcagtcatctgaggccatggcatgttacctctcagagcagaagggagaggcttccctctgtggaggggactgagaaggctacccatgactctgaatcaagagtggttttataagtcaagcactttgtcttcctgctcttcagagaagctaaaacaagaaataaccaaaaggagacaatgtctgggtcagcaactgattacatttttgatgtcacactgccttctgggttgggagaagttgaaagacttcatagaatcacccccgctcatcttattcttggtgaatactcttcacacaaatgtcccaagtgccatgctcatagaggggttggtgcttgggtcatcagtaccttaggccatagcagttctcagaagacattatccagaagcaaaaagccattatctagaagcaaagttcaggaatgaagattcggtctctcataggtcctgctaacacttatctttctggcaaaggataatgataaaaagaccgaacagatgacaaaaagaaagcctacattccagatggattgtgagggttagggagaaactgggctgaagcaaaatgctttaatttttgggatattggttatttccccagtttttactttaaatctgttgctccagaaataaaaggacacgctaggctttagttatatgaaaacatgatattggttctgtatgctgagaggagccagaggtgggttgagagcccagctctgtggtgatgggccttggaaccatgtctctgatgttctcatgtgagaagcagatgagtagaggttggtggcagagttagtgaaatagaggctggctcccgcttcccacagtgctcagggacaaatgtggagtatattaataaatgcagagtcattaatgctttctgtgagtgaaaaataagtgtgtgaagaaaagactccattgtcattggactgtaaatggtgaaagggtggaaaatgaaaccaggcttgtgttgccctcctaggatggctgtgatgacccaggccacttggggttccacatgagccctgtggaatgtgggctgggccacctgcaggtcaggctgttcatgctgttgccctcaccttctctacgggtttcaaagtgaacccttgtgcagggaggtgtggcactccctgtgcctttgcttctcaagctgctgagtgacagtgacaagatgctggctttggagcaggcactacaggttcctatgcggagagcatcggtgctcagggaagggaaatccacccctgtgctcttcacacccagacagatgctcacaggttccagggatatacagggacatttctaaatctgtcttggacgtccattcactttatctttagccatggaatgctgacaagtattcagtacggttgagtgaccttctataggtcagagcaggctgtgttctgattgagtttagaaaactcataactctggccaagccttcaattggtcaggtggatggggctttgttaggggagactgcagccagagccagtgtcgcccaccttccttctccctccacctacctgagctgccagtcccttcccactcctcaaacaggacttctctggtttgtgaacacattttctcctcttggtgtgcagagcttttggttccagccctgtcagatagtgatggcacagacccagtggtcttttaatcatagcaatgggctcattgctttgaacttgcatagtctaaaaaaataaataaataaaacaggaccagcaagaacagctggaagaaatagaaggaacttgagtttaaaaagttggacacagcgatggatccaggctcagctggtctcattcctctgcctgaacagcttagcagaccagataacaaagaatccttttgcagctgtttttcttcaagttagagaattttagagccacaaaggaaactggagattatctttatagatgaagaatctgatgtccaaagaaattttccaaggttaaagagatatctgttgccagagccaagataagagcacagcttcttccaacaccttaattttattgttttgttttgattgttttcctttcagttagccccctaggaaatgtttattgaggacctactgtgctcaaagttctgggcaggcttctctgggtaaatcctgaattcaggtgtgtacatctggtgaggaaaacagtaaacaagagtaaaataagacagtcaggcaagagaagacaatgcccagaatccagtgacattcacaccaaggcttaaagtgcaacagaaaatgtgacagcagaggaaccaggaaaacctttccggaaggagccctgggaagagcagaatgggtgcattcaccacctctcctcacctactttgggatgctcatttgattgaatttgtaacaaacaaggcctttgggtcagtcctgcttcttccaccaacctaagggatgatggtcattgctaaagcttcctctgagccagtccttcgccaagtggctttacctgtttattttatttggtcctcataacaaccataaggtaggttgtatcactgattttcagatgaggaaactgaagagcagggaagctagtgacttatcgcaagtcactcacctagtcagcggcaactctctgttattgatggggcttcacttacccttagtgtgaaacagaagtgtccttgagatcacatatgcccaaagacattatcaaaacacagacgtgtggtgatgcaggaagcctgagaacccttggcatctgtgcttttcacatgtagaaggaagaatctcattgcttggacatgaggggatataagcagcgggtcagggcccagcatcacactgaatagagctccaggaggctcacaggaccctcatcagaggctctctgtgtgttttatggttgattgagctttatgaccccaaagaatccgttatttgttttctttatagcaggcctcaaacactgggctttggttattctttaaacttacaatactcattgcatgacagaattatttttcatttctctctttctttcagagccttggaatcccattaggaaatttctagtacaagcatttgtgggagatactagtactcgggttgggcatctgggagagatagacaagctcttattacagcatggaggatggggagattacctggccaagtatcatttcaggttgtggcagaaagagattagctccaatttatcaccgctcacattttcctcttttcccccgttttctgagtgtcatggaaatgatatttgtgaatcccaggggcctctcacagtggtgtcagtttagagatcttcccagatacatctaaatgtggacataaaatgtaatgggaagaaattgaaaaaatatctgtttctcgattctttattactgtggagttaagaaagctatttctcatgccgtttcataaatttgaatccaaatgtatatgttaatgtgtattcagatggcttttggatgattcaaacatgcagactcttttttttaataaagtttgtcaaatttctggcaatttagagatacatgtttagacaatgtatatgtgcatacctgccatatgtacatacactgtgttgtcaaaattgagcctaagtgaactatgatgaaaatttaaaataagtaagcttatgatgaatacttagtagttgaactcagtatttgatttgtaaaatataaacatgagtgaaattaatttttggctgcttagtccattaatattttacctaaattaaatttgaatctaacaaagacaaacatacacatttctctccaggtctattattatctctgtgacacaaaagcacagagggagagttcagactctaaaagaaatgcagtagcaagccccaaagagaatttttttaaatttcagggaaggttttatgagacaggaaagctcaaagacatatctgtgacatttaaatgtctaccatcagcttgtttcctaatattgccattagttttgctaattagggccaattacttaatgcttgcctgggttgtggttgggttgagggtgcatggtggttcatgcacaatctgttcttctgattcaaaaacaccattctctccttgcactgcttgatccttagcagggaaagcgcccagttagaagatgtgcctaaactaacacaaaggaaaggtgttgtctctgaagtttagaaagaattcagtgagctcctaacctcactcaagtgagtttgaaccacaggaccaagctggctgagtgatctcaggattagacaagaagatcaggagtgctccttgatcctcactgctggctgcaggctctcaaagtgccactgcgcctgcacccagtgcttctgagaggtgccagcagggatggatggtaacagtggtagtcccctgtgctaaatgcaggcgtatgggtggggaatatcttttggggtttccctctaaatagtgtcatatctgaaatctcagaaacagaagaacagtcagcatcatgtcttctgaaccaatgctgatcaggaaggttctttacggcagagttttcgaactgtagggtatagaacgaccccttggggaagtctttaaaaatcttacccatcactcaccagaagttctgattcccaaggttgggagtaaagtgtaggagctcacctcactcttggttgcatctcatgagctacattcctcaagcttaagtaactgacactgtacatagatcgttaagttaaagatacaagagcgattaagaatccagcataatctgtaagtcagtgataccaagggtatgggaggcaatgagggcaaagagagtggtgcagtctgggaaggcctctggaaaggtttggaacttgagcaaagctcattggccatgtaagatttagataatatcaggcaatagtgaatgggatgagtcctatcatttgtggacaaattgactaaacaatcacaatgcacataatttcaaatggccaaataaataatcttcatagtcatggttcagggtgggtaaaatattgagggtattacttctcaccccaaaatggcctccatttccctaataccccatctagacctgaaataaggtcagccctcttttagtttcgctgagttcagtagaactgtctgtaactagctttgcaactgatcttgtacaaggcaattaacttcacttagtctgatcttccctcgtttgtataatgggagggttgtggtggatgatttcagatccctttcactctagcattccatttgacccagttaaatgcttctcattattacatgactggaaataggccaggtcaaatgatgccccttcaagcagaaccatcagatccggctgtacacggtaaagatggatattagactgctcaacttatcatcattagtcccgtagtctcataatgggaatgcactatagttcatatctgtcatagttagtatttggaagactcaaagctggtgagattattcacatatttattcctgtgtaccgcatatgccaccccacgtctccccttcatcatgtgtctatgacaatatattgaacagaaaatctccatcagctgactctgacagagtgtattatttacagtggtgtcaaaatgtgctgcttataattgactgggctcataataaaccaacctaagaatcttttcttctcatattccttcttactggtaaatcttccgcttgcattccttccttccatcaacaccttcttcattatttacagaggagggaacacacaccagatggtgcatgagtgatattgtagggtgactctttcatcttgggaaggcctctctctcttctctctctttctctctgacttaagattttgctgtggtaattaagggtgagagaaatcaagtcaattggacttagtttctaaagcaaacagaatacacttctccatttctctgagcttcaggagacaatgtggggtgacactaatagttgcatgggcaatttcattttttatcctcatgttttcacttactatctgtgaaacctcgagaaaattactgaccttctatgtgccacggttatgtcatctgtaaaatggggatactgatagtatctaacccataggaatgttgggactgttaaacaagtaatgcacataaagggctaaacccaaactaagaacaacaacaaatacacctaggccaaggcacacataaagtacggtcattcatgttccccattcatcaatagagagccccctaaaatgttcctgtaccagaatgtgtttggaattgcacagggggagtggcagcctttccagcccccatccagcaggatgtggatgtgcgaggctctgcccccctctcctctccccagctgtgtacctcctcttgttcttctttcaaagactcattacacttggcatacacatgagattcttacctagcctgaggaagatttccaatttttattttgtggctccaataatcataggtattaagtatgactgcctctcctaggctaacctgcaaaagccagaggctgggtttctgtggcaccgtgctcactgaagcagtattttcctagtcatagcagccacctcccatctgccacctcgtctctctgcctggaatatccagaaacactttggtgtattattcccacatttaaatggacaaagtttgctcatagaaagtactaattttgatgagcatttctttttaatttaattgctctgatgaaaaccctcataatcatgtaattcttaaagattagtgtaaggttattgccctgaaaatatgtctagtttggcacacagggtaaatacgtgattattgctaacccttggttttacgcaagaaaattatcattatccatcaaagcaaaaatgtttagtagaatgaagtaactgacggaaaaaatgcctgaacatggggtcctgtgactgagattgatggaacacttatcatgtggctttaatcccagacatttgcatattttctcacaaccttgcttctcctctcagaggtttaggttcttagcttaaaatgagaaggtaaaactaaatcataggccagatgtggtggcttacacctataatcctagcgctttgggaggcttaggcagaagactgcttgagcccaggagttcgagaccagcctgggcacatagtgagaccctgtctctacaaataaaacataaaaaattatctgggcatggtgacatgtgcctgtggtcccagctactcaggaggctggggttagaagattgcttgagtggggaggtgaaggctgcagtgagctgtgaacacaccactgcactgggtggagtcacagagtgagaccctatctcaaaaacccccataaaaaccaatacataaatcatatgtatagtcaagtattttatcttaaaaatcagttgatttctctttttaggcgtgcatagaaatatttgtttgctgagcttctgcgacaagtcttacgtaatgaataaactctggtgttcagttgtcttctaatatagaacattttaatttctgagggaagatgcaatcattcttccatttgtgtgatttctttatttggatggacataagtgaagatttactccacctaggtctcaaaaaattgttcaattttacggtatacaaaaacataatagtggactaatcttatttaactgatgaggaaactgaggcaaaaacacggccaaggatgaattagctatggagtcaggaataggattggggtgccttcattcctagcacagtgtttcttcacctgtacctcctagaatcatgaaagccataaggtacctggtacctgaacttagatcaaacagctttaagacaaacagatgtgtacagtttcaaatgcaaaacccaacatgaacatatttgtttggtttaagggggctttctattttgcattctcttgcaaatgctgttttccaaaatgcttaccgttcaagttgggtaatagccatccttccattgactgatcatccactaccggctcttgactctggcatcacatcttcgagataatccgagctagagtttggctgtcatctagaattcacagttttagtttagcactttgctgactagtactttgcggattagataatggtagttagctttctgagactctgggatggcaagcacatgggccatgatatttgtagtagctagtgttatattgagaaaaactaaggggtctcaccagatgaaaccatctttaatatcactttgctagctatcaatacagcatagtgtagagtttaaagtgctttatccacatttacatttcaaccacagccttgttccctctagacatggtaggtgagatttttcatatgcctatcaccaccagctatatagatttgtaacttaccatgggttgtaaggttatattttggcatttcagaagctgtcctcattggatgccagaatatttgaaatcttttggaataaacaagtaattggttctgtgagagcttatgagttaaaattaacttaatattacccttctgggtttatattggtttcttctcctgatttttattttattaagcacctttctaagtcctggtaaggttgggtgtatggacaaggaaaccttctacttggatgaaagaaagccccatggaaggctgagtggatgagcgccgactcaccttggtatttaacatgactacagaatggataggtcttcacttctcaggcctctgcttcccattccacaaaaccaaagctttgttcagctattccctgggtggggtgtttgcctttcctctgagaaaatatgctggcattatagaaaagggagttgaggggtgcggttttcctctggcatagatcactttcatctaatctgaacctcatagaaagcctctgctgattcagaggacaatgactttgacctatttatttcaaggacccacccaggctcagcccagcaaaggagtacacagtgcttgctcagaacacagctgaaagaggaggtggtgttcaatgggaatcacaaaggctatggtagaagtgagtaatgagagctgggctcgagccctggtctgagttcagtgtggatgtttaaaggcgaccattcttaagaggcaagagaattcgatactgggttcaaatctcaattttattttaaaagtgcatcagtaacttgtagctcatttgatggcctgcagcccagcttgtttagaaatcccttctattctctctggtactccaagtcccaaagaatctgttctgatggtgtggttacacaaccagccaagcacagccttaggttgctctcaactcagaactcaccctatcacacgttgacgaatgcaagagcctgttagagacactggaacccaagatggtgagtaatactaaacaaaggccaaactctctaaaatgcttaggccaggaagaaggacaatggggaaaaaaagtttggatcagtatgtatatgtgtgtgtgtatctgtatgtgtactatatgtgtgtgcatagtgtatacatatgtgcatatatttgtaatatgtaaaaattatatctataattgtattcatgtacatatatacatatatgttcatgtgtacatatatatgtatatttatatccatatatatttatattcatatgtgtatataggtattcccatcgtatgtgcatgtatagtgtgcctatgaaggacaaagcgcggtgcaaagcactgtggggaatacttggtagattaagacacaggtcttcctctcaaggatctagagggcatgtagttattaaaagctgttaactatcccaggaatgcctacccttctccatgatttggtagctgatataggataatttgcccctggattttgtgaataataaagaacagaaggctggtatcacaacacttgctgtggtcagtttctctcctctctcctgaaaggcagtaatcacattttctagttgtactgcctgcttttagaaaaggtctctgctgctatccaaccagcacagtccctctttgcttcagggtcttggcaagagcaggttctgattctgaagcattaacattcttcagggctctgactcccctcagaggtctgtttgcttctgaccctgcagatgcagggcatcacggatgtttatttgtctgttacctaaactcaggacacatgcacagcagtaaattcttcatttgccagagttaatcacagccatgctatagcttatatcattcccactgcccattgggaaagccttgaaaatatagatgggatttgttctccagcaaataagttcaacaaaccagattggtgagactacacagagggagaggtttgagttggagtccctccttgggtaatatcttattccattcctgccaaggatcaaatttaagacttgctgcattccaaaaaaatagactagtgacaacttggagtggagggaaacaagaaaaggttctgtttgtttgctttttcattaaacatttttaaaaattaagaagtaatggagaaaaatataatgttactcatgttttcccaattcaactgaatatgaaaaagtgctaacattttgtcatatggacttcagatcatttttattattaagaaataaaatatttagaaataactgaagtccctcacattcctctccctagtcccagcttccccaaagcaaatattgtcatgcatttggtgtgtagctagtccttttatccttttattgcgtagatctgtatacagctataaatagtatacggcattgttttagtacttttaaaaattattatcacagtgttatactataccttttaacaatgtgtttttattttatcaacattgcgtttttcagaattatctgtgttgaggtatatacattgtgttcactcattttaactgctatacagtactccatcatataaatttgatgcagcttatttattcattcctacacagatgatcatttccaaatttttgctattgtgagcaaagctgcaatgcacacccatatatagtcaaccctccatatccatggtttttcatctgtggatttaactgtggattgaaaatatttgaaaaataattgtgtctgtactgaacatgaaacagacttattttcttgtcattattccctaataatgagttctacagatatcttctatgtcaagattgctaatcatgctgctttttcttctaaatttaattttttcttaatattttgtaaccatgtttatgtgtttctcataaaggtgttttattaatgaagttaagctagtaactagtacttccaaaatctagtaggttaacacaacaaaaatcttgtacaaagtgagctatgtaattgtgtgattcctgcagtccacttggtgactcacagatccaggttttcatctcaagaaaaagcaggttggagctgccacgttgcgtggaaaacttacacccacttacttatgctttggctgggaagtggcacatgttaattccactcagagccctttgggcagacctgccttgtatttctaggtgcagagtggtctttatttattatgctcagctgagttggtgtgtgcctttagtgtgagaatttagagttttccttagttatggaaaagttctctattgttagctgtttaaattgcttctcagtagtcctgctgtggcctaaattctggaaattgtgttcggtatatgttggagactccatactacttgatttctttcttttttttttttaacctcattatgtctcagtgctgcactcagaattatttcctcactactgccttccagttcactagtgttctctttaaccatggaaactcttgcgttaatttcatttatagagtttggagatttcaattatattatttctgtcttctagtttctatattgattattttgttagtcatttttctcattttatatctattagtttacatagtgctttcttattcaaaaggatattatcttttactttaagtattttttaaggtttttcagagacaattatgtgcacttttttctgtagtcaaattttcctctgattgttgagttctgtggatatcttcttggttctgtttttccttattggttttgaattttaggttgcttgctcatctagagtgaaaattatctttaaaaataaacctttaaatatccatcatgttttgcagattttcagtagtttccatgtggctccctgagaatctcaggccagaaacaacttctatgttagtggactaggattcctgtctcatagtggtattggggatattgcagatccagtacttagcagcttgtcacatatctggtctgtgtgacttgctctgttcattcctgtctcacatgtacatggtgatatagttcacagccttaatttttctcattttacccattcaggttggagaccctacgagttttatgctgtgagtcaggcttgtgtccctaaatcagtgttcagtgacagccttctctttgcctttgtctgtttctaacctagagttcaacaaccccatggttccagcattttttccttgatgtctgtttcagtacttttccagtgtataagagatattcatcttgtattgggtatagatacaacttctaatttttgaaatttcagctagaattgctttttgtggtgtagcaaggaaaatgtattgaatgtttaagtttacaatgttatcttgactagaaatcttttacatttattttaaagagtttattttgatagtaaaagaatagatgttcattaacatcttgaaaagcatatagaaaatatttaaataaccaaaaatataactgcataaaataattacagttaacatgtcagtgtgttgtcatctatattttgcttttcactgaatagaattcacactatatatttcgttttatatccttctcttttataccagccattatagggtggatttaccatgccataaaataatcttcaaaagcaatttttttaacagccccttaatgtcccaacatatggaggtactataaaaacataaatcatccaaattttaatatctctcttagcataaattaacaagtaattacttagtaaaagagtatgaatatttgtaaggcacttgatacataatgaaacattttgatccaaatacgctatttccaatttacattccaatggtagcgtaatcattctctagccagtactaggtattttctctccaattttaccagtaggatagatgaaaagtgccgtctgttgacatgttagtgctctgaaatattccgatatctcttttgatattatttcttaaattctaattctttagctgtatttttttctaaatgagactctagattcctctccttttctggttttcccagagaacctgttttaatattttccatttttcatgatttttgcttacatgcattttttcttctttagccttttgttgtgcaagcattcttattttatgactctttaggctgattgtttaattaattaattttagtaatctcctgtcaattcacaggcttacatgctttgttaacttctgagtctatattctgtaagtcttgatatgaatttgcttattttcatttatttccaaagtaggtatagcagatgtttatttactttgtgatctaatgtttattgaggaaatccccagatttatttcatcttttaacttagatttctgacattataattttattaaattgaagtttgagaatacagtttttttctttcaagaactttatcaaatatactaaatgaattgacaaattttaaaatgcctcaggggtatttgaaaagaacttacattttctttttgaagggtataaggaaatatatgtatatatatgagtttatgtatttatttataattatgttattcaaagatttcattccttttaatatttgtttaatctggctgacaattgtataatatttttcagctcttcacttctggtagtttttgctaaatagattttggtgtttgatgaatatattatatgtgtcataagttatatgtcctttatatcttcattgcagaggattccttttctcagcacaaaatattatcttcttttcccagatattgctttctgacttatatattgttgctatcattgttttttgcaagactttctcgtatactattgtttcaataaaaccatcttttacattttatttaaatatttttggtgagctgtatgtacttgattttgtaacacctattaggaaaacttaaggcattcatatctgttgctatagcatatatttgggcttaattttataactttgtttaatgctttcttgctttttcctttttattctgggttttgtctgttttcatcttatgtagaggtttggaagatcaaaatattttcattaattgtactagtgataatccttttgtttataaactatatactaaatcctatattcctctgtcaaattcaagtaccagtttctaatgagaaatgtaaattatctggacttttcctgactttctacttctctgtatttatcagtgtttattccttttacctggtgttatgctatcaacattttatgataaaatcctgatttttaaaaatatatgacttttccagactttgaatttaattttgtgcccatgttacaacagttcttcatatgttttcctaaaaagttaattgatttcaaagttccttgccattttctttatagtttagctattgcagtcttgatttcacagtcttgagttcttgatttctctttttctttattagttgacagacattcatttttcgtgtgctttctcaggaagagaataaaaatgattaatgtttttatgattttaagcttagtaaaatgtcttcctgcaacctttttacatgaacaacttggacataaacctcttaagttatagacttttctagtcattgctctggacaaatcgtttcattgtcttctgacatttatttgattttgcaaagaagggtgaggccagccttatttttgctactttagagataagctctcattcctcttttcatttttgtaggattttaaatttatcattgagatttaaaacacaatagaacttccctaatatttctagtcactaaaaaagttcatttcatttggttctcactaagccattttatttaaagccttataagcatataaaacttataaagtctttctctggggcaatttctattttattaattcttttgtgataaattttctgttccttcctcagtaacacttcatctggatctaaattgtcctccacgtctgtcatcttctcttctatatttttcctcggaatattgagaaatattctttaaattttcttccacattattattttacattgtttcagttttacttctgtttatattgcctcaaatatggactttcattttaccattggattttgggtttcctaggttaatttcttaattcggccagtttactaattatctcttcattcatctcagaataatttttcctttgacactctgattctcttttacagagtctgttttacagagtttttgaggatagcaaacagatgagttctaaatcttgcttttgtctcatgtaaaaataaaatttcaaatatatcctcctcatctgagtcaacatggaagagctcctattctagatgatattgttgtctttttttgtagaatccatagtggcagatgtatacatatgtttttctatgctcatttttgaatagggattgttgtgctctaagaccaacaagcaggttctgtggcatgttccttgcttctatgtcactctaatttggtaggattctactcttgaagtttgaagtgatgtacttaatttgggatgtctaggaagcattcttctgtgtgtttctgatttgcatttttttttttttgagacagagtctcgctctatcgcccaggctggagtgcagtggtgtgatctcggctcactgcaagctctgcctcccaggttcatgccattctcctgcctaagcctcccaagtagctgggactacaggtgcctgccaccatgcctggctaatttttttgttatattttcagtacagacggggtttcaccgtgtttgccaggatgggcttgatctcctgacctcgtgatccgcccgcctcggcctcccaaagtgctgggattacaggcgtgagccactgcacccggcctctgatttgcatttttatagacttttattgacagctggatattttgagcaagctagggagccagatatacttttccattttcctttgaacggtgctgcatgtgaagactatgttcttcaggaagtgcttctccaatgcttttttttttttttttttgtggaggagggtggtggacagagtttcaatcttgttgccctggctggagtgcaatggtgtgctcttgtctcaacacaacctccacctcttgggtacaagtgattctcctgcctcagcctcccgagtagctgggattacaggcatgtgccaccacacccagcaaattttgtatttttagttgagatggggtttctccatgttggtcaggctggtctcgatctcccgacctcaggtgatctgcccacctcggcctcccaaaatgctgggattacaggcgtgagccaccatgcctggcccgatgctttgtctttacccatttataattattttcttcaaaggaatgacctatccctaaaatcttcctgtattttcttcattgcttgattgaggaagtatgaagagaattctagccctctatggctctgaggtcacttatcagatggctcatcagtgtggacaggaagtgggtggcatcttgacatgctttaagtcaactagattgtgtatgcctatgtcctatgctcttattttgcttcttcaaatacacctaagtgtgagggagcattcaatttggatgtagacaataatatatggtaagaagctctgggatctgggtcagggcctcaaggtccatctgattgcagcagggatgtgggaaggccatgtggggtccagaacacttaactctcttttaaatgaaacacctaatcactcacctgtttctgctgccctcagaattttagaaaatcactgaaatggaatgaaattaaaacttacctactccaactcctttaacaggcagatggtgtgaaatttaagatgggaactgaatgaaaaaaaaaaagatatccatcaggtaaagatgagaacagaggatgcagatggctagaaagctggtacaaagatgtgaagtagagggtctaaaagaaagccaggaatagttgacgtatagtgggctagcaagaaaatggaaagcagtgtccaggaagaagatatttttatgttggggtaaggagtttggatttaattaaagtgttattggaaggccctgggggaggatggtttaaaaagttaagtaacctaatatgatcagttaacagcaaaatgtttatgtatttgttttattcactcatacacttgtatattctttcattcaataagtaaactcatatttatcaaataaccactacatgtgatggagttatatcctaggattccaaattcctagtataaggggtatttctattatgccatgcaacttctctactggacagtaaactttgtgtgaacagggtctggacttctatatatttgaatctcctaagacttcaacagtcataggagtacctgacttatggtagcccctaaataaatatacttgatagatgaatgataagtaatattctataatgttcacagaggtctctgaaatagaagaatatttctaaagcacagttaaagatagtcatcattagcagtgaccaggattccctgcagggcacagttccataaagctcttgtaaggactgatcagtgggttggatccattgactcttttaatcaggctaaatatgctgtcccttctatgcatatatttgctgggattctgccatgccagtactagtttggccatgttgatatgaaagagtaaggatttgtctatttagttgccaactaaggtgtaatgaaatctcatggcaaagtgtatatgaattcaaataggagccaagcccttcacctctactgtgggttatatgacatacagagtcttcttgaaacatgtattcccaagactttcaacagtgcaacatctgttttactttgagggggctatgataagcatctgcttagaggaatgatctgaacaaaaccagggcacatttgtttgccatgctatagattatctagtcttacattgttaatgaataaatcatgcaggatggataaaccggtaaccacaacagcatgtttcatactgcatttaagacattaatttatgcattcatatatttttcctgtagacactaaaaaatttatgttttaaatagaagatcacatggattttgatgtagctcagcagttggatgtagattccagaaattcctttattaaattagagcccagttggctgattagggttctaatgttcataattgtaccatttgatgcattaagataagtgagccaaagataaaaatatagtgttttatgagaacataaaatgcatatctatgtacatattccatgtttgtatgagacattacatttaatcctcaaaactcatttcaaagttcatgtcgtgaacgtttacaaaagttcaggaacctcttaaagtcacataggcaattagtagcagagtctgaactgagaatcacatcttctcaggcataatctagttttcctggcttaccacgacaaccgtttcattgataagttattttgaaatcacatttgggggccatcactcacatgtagtatgaagctaaatctagaacaacattcattttgaattctttggtctggtacacataaatagttcttaggatgaatcacatagatggaggagaaagatagacaaaacgttgatctttgggtgattgcattgaggattctaatctctactgacgtgctaaatgttggaattgaactaaaaagagtcactaatcatattacttccatagtgaaagtagcagtgtctgcattgtatgctcttttgttgtttaatgcagactccctaaaaaggcagattttggtcactccgaggctgcattattctttgtaccaacttggctatcctaaaacgagcaaaacaagcaagcagagaatcgagacatagtaaataaacattcttaaaacccacatgttcctttaaacataaagaaaaaaaatgacccagtgagaattggaggtgatttgggtctgcattcgctcagctagaccaagctgttctcaccgccaccccccaccccgcccgactttgacttcctttttatttgtatcttccatttcctttccctgggccagatgtgtggattcccctgttgtgcccaatgacagagtagacttttctggaaactgccaggactatttgtaatctcctgactttacagaggtctcatatgctgagaaggacaaattctgatgtttcacagcaacaggaagagggttagggatgttgagagaaggacaatttgggtggagttttcacatatgtttctctttgatggagaatccagggcagggatctggtttgactggggccaagttgtatttctgctctctttattccatgtgacttgagagagcaaccacatgagtacagagttttagtttggagcatgacttcctcatcctagaatgccagagtcggagaggccattaaaggtcatgttgtccaacttcccataaaattaattttagatgaagtctgcaggagagagtaagagagcctctgtttatagaagaaattgtctcctagaatctaaaactgtctgttgcccattggatcaacatctatggccacccagaattggtgaatattatagaaagaaagtgtgggatggtgttaaaggacattagttcaactcgtcacccaacgcccaaatcccttgattagaaatggaaaatataagatatattgatggtattgaattggtatgaaattctgaaggttttaaaatgctgtttatccccaagaccaaaataagtgaatcctaggctcggctggtcacctcttcctgcaaggtcctgaggtaagagtatgcatcgatgctaatccctgatgggatgagactttgatattagccagggcctttaggaatacaccccagtaaaaacactgatgggctaggatgaatgtcacaggaggctccttaccttagtcagcttagggtaacttaagggtctatgctagaacaaaagcaggccaaaaggtctgttctccttgtggtcacctctaaactcaaattcaagttgcaaatcttatcacttctctgggagacaaggccttacacaccggttagcagcagatgaaagcataaaaattagagtttgtggcccattgtctggcatagatgtgtaggggaagtggcaggggatcagagggtatatgacaagggcaagtgttatcttctgggaccatcctacttagttatgtgggagaggagaaagcccctgaataatggaagggaatgtcccaagggatatatcctgttgttactctggctgtgtggcagagtcgggtagtaaggaatctagaagggccacatcaacttgtataggcccagtgattccaactgtatgcaccacagtgaagaaaaggtattctatgctggccaaccctgctagtatttctcctcttcctccttaggggctgggttgttgggcttgggaaagggtatgaatatccctcagagaacatccccttgcatagcatctctacccgaaaatagtcgttcggtctccattttgttcctggtgtcatctaaaataaggaacaacaaatagccagattcaatttcagcattatggtttgagcaagggcctggcttctagagtggggtgtgttgagatggttttcccactatttttatttaactcaccaaatatattctgtaattgggcatgacccagcaaaatgttccactctgaagttttatcatggaggccaaagagcatgttcaatgtctgccaagttctcaaaggaaatagtagtgggagggcaggccctgagctggagcttccctggtgactacaaaagcaattgcagaggaccacgtgatgtggctccagagcacatgactcagatgtccattgaaaagctgtatttgctcagggtgatggctaagaaaaatgtcttatgccctttaagaaaagagtcttgttttgaagtgagataatccttccattttcataaggtagttactgaaaataagtgttcattttctttgtgcagaccaaggagtaggccttctgagaaagttgcactcttattaaaaaaaaaaaaaaaaaggcactatttcagatgaaagcctgagatgcagatttgagatcttaaaacttgaagtaaaagtcagcactctgatgtgcccagcctgtcctttctaccttcccgttgttaagaggtgttcttttctagctcttgaaggaagactttcattcttaccatgtcacctccttcttcccttcttttttattttttggggtctgaaatagtaatcctgcaacacagaacttgtttggaattctgactgttttaatccttgccttaatttactgaggttaagttgaagataggaagttgagtgttggttttttcaaattgtggtcttagccgtaactccgactttgaacattttcggcagttccatggatgtctgcggatggtcagagtcacatttcattgtctccaagaactgtcatgaccctgtctttagcattccttcaggcttctctttactacagatcaagaaagtacttggcaacagtctcccattaggagagagcattcagggttttagtttcaacttttcgaagtttaatgcttttccattttcttttctccgcgtcagccatgggacaagtaacgtatagttgatcttcagtattccctgattctgtgtttgcaaatttgcctgcccactaaaatctgtagcccccaaatcaatattcatgacacactttctcagtcattcatagtcatgcacaaagcagtgaaatgttgagttgcccgatgtgcatgtttccagctgaggttgaacaaggtgacactgctttttcgttgcagctctcagactgtatgcaaatgtctttccaatggtctatttagtgctatgcttttcatgtgtttgtgttttttttggtgattttgcagtttaaagtggctgccaagtattgtgctgaagttctgtatggtattcctaagcccaagaaggccatgatgtgccctgtagagaaaatccatgtgttagataagctttcttcaggcataagttatagtgctatgggccataagttcgacattaatgaatcaacaaaatatcttaaataagtttccttaaacagaaatatagaaacaacaaggttacgtctcaatcagttgacagaaatgttgtgaccagaggctttcaggaacctaactctgtatcttccttaggagcaatcgttcagtatttgctaattcagtgtttgcagagactttatagggtgtagctgctgcaaatgacaagaatcaactgtaatcatttactaagtatcagctgtaatggtgaagataaatattctagacttaatatgccaggagggatgtgcgtgcctcatatgctctatggacatgttacagtaagggaaataggaggtgtccccctcaacctggaactcctctaacaagccagatagaaatgcatcattttttaggccatttcacttggatcgaagcttgttttctttcacactcctagtgctttcaaaaaaaaaaaaaacttggctgtttaattaaaaaaaatttggcctgttttgtatatatttgcagtctgagcacccatagaggggagtcacccctctcctccagacaagggtgggttgttgaattttatgtgaaatcttgacattgcaataaatctctgaacctgaaccagcctgcactggatatttaatactgttttcatttccaatactaatcaatcctggaagaatgtgctgttattttttagttacatgtaaacatttagatgaatataaaatggcttattgatagcttacatgcaggcaagtttattgatacttttgtcaaattctgtttgattgattgatttggccatcgtactgctatggatatggaatagaaccaatatgacatttttatttcctggcagtggtacctgagggtgaatgggatatggggaagcttgagctctgtctcttggatgagagcactatcagagcctgatcagtggagctcctttctttaaggaatgacctcaactctgtttcacatcagacacagtttggaagaccccacaggccattgcactgttgtatcattcatgtgggaagcccagcttcacaggggccacagaaatctcctctatgtgacacttctggctacagtgcattattttgttttattctgattttttaaggaggtccctagtaggcatcttaggaaactttgaaaatatattaagaagattcggcatttgatgcacagatacaaataaggccattttcctcagcctgcaagcccagtctgagactttgcaacctttctctcttctgattgtgaattccaagtgtcaagacaaaatagcactaagaaatcagtaaaatgtgacggtttttctcaagcgtctactaagagcctagccagatgcacatttcttattccttttggtaaatagattcagatttggtatgattcaatgaactaaaaaatatcccctgctcaaagcttgtctatgcctgctaattgcatgaagcttaacagatcctccacacacggcaccaaataagggctggctggaaatcaaaacctccttgccaagcactttggattttccaaaggaactgtaatgttcctggagatgtttattaatggaaatggggaactttgtggaccagggtgaagtcccagagattgatagcctgttactagtgtttattatttttgactgcaggttttgaaagcttttcctcctatcctccctaaaaggaactttctccgtcacttgggactgaaaatgggggtggagttcaacacctcatggagcaatccaaaatagacgcacagaatgttaataagcccaggattttgccctctgttttgtattgctctgccccaaaatacaaaacctaattagtgcatccagagaagcgttaaatggatttcatgctgtttaataaatgctttacgtgctttggtgccactgcgaaatgtgtggttgagtgagggtgggaatagggagaggaaatggttgctgtaaatgcttcctaccaatgtcaagcactataggatgagcatcagagatgcgtgtttataactcaggtgcttcatgttttcacccgaattttcctccttttggctagcctgttattttccttttgggcttttgtttttttaattttattattattatactttaagttttggggtacaacgtgcaggtttgttaatatgtatacatgtgctcccagacatcgtctccaaaggctcaacccacaattgtctacactcagaacaatgagaaattgtgagtgacagatgtgcactgagtgctcactgggtgatgagccctgaatgggacatgggaattagaaggtgtggccattgcctctggagagcttatgtccctatggggaagatagaacacataatatcctattttcaagatagaccgtcagtctggtgttcaaagcctttcataatgtgtcccctatttagtgactggcctgtgacatctctcctagaggctggtctttattgtcttatatgttggtcagtggttgtgagacttcgctgcacagtagaactgtcaggagagctttgaaaaagccccagtgttcacactgcaccctctatcagtgctttgagatctttaacctgcatcaggatcacccagaggatatgtggaaacacacatttctgggcttcacacccagcatttctaagtcagcaggtagagggctctaaaaatttgtatttctagaagttattgctaatgctgctagtccaaaatcacacttgaggaggattggccttcatcaattaaatcagaattgctgtgtgtctgatgattccagcatgcagccaagatggagatctgtgttccacacattctttaatgcatgtggtggagacagatgatcacatatcgtgaatgcctctgattattttccatgatttagctatttttctctgactagacagtaaaagtcgtaatagcaagaactgtgtatctttaccttttcttgattctctcagggtgcccagcccagggtggtcacacagaagtgtaacttgaatagtgttaaccaaggaaacgtagaagggtggatgggaagcattgcagataccaccagcactcttcatttccctactctccaaaacctctaaggaaagttctttccctctatttgtggactctaagatgcattgcagagctactttctctctcctcttccctccataggggagggtgcattttcagcatttacttttaaagaaagcaactgcaaagagtactgtattcatagataaaaactgcattcacatcctggctctgatgtttcttcttatatgatcttggtgacactacttaacattttcaagtccccatttattcataaataaaatacgtataagaacatctctttcacagacttctggaaattaaacgagtttgtgcttaaaacacttctaaggacaatataaaacacaaaaggcacagtaggccttttgtttataaccacattgtagcaaacacacatttttcctggaaacataatgggagtgctcttgggttatgggaagtagcaaggggagatgagcaaatatttgtgcctcatcctgacctcgccatgcatggtgtgaaatgtctaggtatgccatcaagaaccaaagtcctgtgtaacagaaaatctccagtgagcctgtcatgatgatggagacaagcctctgttgaacttcactgccagtgaactctactaaaatgtcagtcctgtattcgcatagcctatcagtcagggagcaggctatgagcactgagatttccacagcaacctgttggtgcctttagtgcattgcttccagaatgattcccatgaaataaagagatctagcattgtacttactggttcttagcaaatgttcttccccgtaggtagagtgccttaactctagaaccataaatttgttttcagaatgcaacaagattgcatagttgtgtaataaagctcctgacagagtgttaaagataggagggggagatggtgaactgggagagccaggaatcctcatcaaactattatgggaggctctgccctctgagaagagaagtgctgtcttaagaaatttccttgatactcaaagggtgttttacacagaatcacctgggcttttgttaagaatgtggactcaggccgggtacaggggcacacacctataattccagaactttgggaggccgaggcgggcaggtcctttgagtccaggagtccaaggctagcctgggcaacatagagaaaccccatctctacgaaaaatacaaaaatcagccaggtgtgatggcatgcacctgtagtcccagctacttggtgtggcttgaactcccttgaaccagggaggtcaaggctgcagtgaactgcaattgtgccagagtgaggaccacagagggaactctgtctcaaaaaaaaaaaaaaaaaccacacacacacacacaaaaacaacaacaaccaaaaaaaccagaatgtgaacaacaaccaccaaaaaaaccagaatgtgaactcaaacactcagacaataccctagaccttctgaatcagaatctgcattttttttttcaggagtcccaggcaatttgtatacacttaaatgtttgaggagaaagatagaagagtctcttagaactagactgggaattaagacacctgacttggtattcttttagttccatcttcacctcagtttctccatatgaaaaaaacagataagtagaataagttccttcccatcagttgacaggaattggtagtaaaagaatccccatagaaaagatttagaagtctaaggtccagaagaaccatcctcttcctcttcacccagctcctttttgttaacattcttcgatgcccaatctcacttccagctgctttggggtttggccgctatagctagatgtctcagcagcttccaattcccattatgagaagttgaaattctcccataggtacacagttcttctggcatcccgcaccatctttgcctgtgctgagtggtgtgtggtctggccttcaagggagccgtttccagcagtacatgtgaggagaggacctgtctcttggctgctaggaagcactccagccagacaacagccctctccagctactcagtgcctcccacattggacaactgggaaagcacacagggaacagtgggggttgttgagctcagcgagtgtttcctatagtgcataattaaagaaaacacctgtgtagctgctaaatcacttcccgctgttcccctgtgcaaatgctgtgctcaataaccttacaagtgcctcattccttctacccaaccgaggcagtgcacagagccacaatgcataaagctggcaagttattagttcagggccccttaaaagatctcttaggattgatttgttactagtccatggggtcccttggttagtctggtggcattttgctagactgcagcttcagggaggctcagggatgggtagtgggcctactttctccaaactgcccttctttgatcagcacttctctgtatccaaggcagtcccgtggaagagctctagagctgcaggagccagaaaaccttaaaccacaacttcaatactgtaattgtgggccagatgcttccccaggggaaaacagccaacaacagtgaaatgagatgcaagtgggacctatggattttgtttgaaattcaggaaagggaagtgacaataaatcaaaaggaaaagctatcattctaaacagacctcttcctgctgctgaagtttatggggtgctttggttaccactaggatcttgtggggcactggctgcccaaagtgaagaagatagactcccttgtagcagcaggtggattggcaacaggattcagtgtgatgacaggctagctttgtaatttacttcttccagggcaaagcaacatggctttcactgcaagttttagagtgtttgagcagatgagtgaatgtgcctaagagacccagtgaagaggattgctggatgttgggcggtggcaggggaggggggaagggctttaaagaaacagaactgaggagaaaggacagctgcagattcactcagtctcttctgcttcactgctttgttctcttcatagccttggtcataactgaaattatcttgtctatgagtttgtccgcttgtgtattatgtatctccccaaataggatgtgaacgctgcaagagctagactcttatctaacttgtgcagagctggatcttcaaaactagtcagtccagtgcctggcacacagtaggtgcaaaataaatttttttttttttttttgtgagatggagtctttctgtgtcacccaggctggcatgcattggcgtgatctcggttcactgcacatcatccacctcccggttcaagcgattatcatgcctcagcctcctgagtagctgggattacaggcacgaaccaccacgcccagctaattttgtatttttagtagagacagggtttctccatgttgatcagggtggtctcaaactcccctcctcaggtcatccgcccgcctcggcctcccaaagtgctgggattacaggtgtaagccgctgcgcccggcagatattctgaatcttgaaggaggaataggaattgactctgggctaagctggcagagaagggtattcccggaagagagatgaggattatgatgcatagaggcaagagaacctggtgtgttgggaactgcaattgtaaggtatgagtggacgagtggcgagagactagaatggcctggtacccagtcaacatgcctacaacagacggggctgggaaaagagctcctaggtgaggacaatttctcagacatgagaatggccagggcagttaggtgaactctagtacagatgtacacactggacaatttaactaagaacaattcatgtgtctttacaaagggttatctttccagctgttacttcctctcttccagctcatctgttggccaccttgttgtttacccctttgagtaaaaataagcaaaaagccagaagaatggggtaacctcaaatacctccttaattttgttttttgagcagctgcttaaaatgtctgaaacattttttgagttagaaatctgaaacaaaacaaggcttccaaatgattcatgagtttccattattcaagtttccctcatatcttcatcaccgtgtaggtaatgggtgtgaatctctgtgtgctcatatacatatgcttgattatatgatcatctcgtggaggacatgtgacacgggaagacaatagggcacatgatatgctctttgatctaaggtaagagtagcttctctctcctccctgtttcactatggctttatggacatgtgggcacacagaagaagcagaccgcactgcagaggctgtgcttatagacataactgcttctcaaggccacagataagaggatggacaggattgaggtaagtctatattttggcagacaagaactcttggtggcctctccattcagtgctagaatgttcctactatcacaccacttagttgatgtttgtgatttcaagtgctcaagtggtcagctcctctgataccactcctatgacactaaggggtcaccaggaatatttgtggccatgggcatatgagctccaagaaataaaagattcattaagggctgccatagagattttctggttcttttgtgacttgagctgaaattgtaagacctgtgtgtgtcatttcctttctgtaagtactctagtcctcccaggagcagcctcctgctccactgcctttggagctatcactactgccataagaaccaaggacagtagctatttgttcccgagacacttggtgcactatccacagtgacccatagcaataaagttaatttcaatacaactacctatgaaaaaggaaagtgaaggatgtgtctaaaacaaccctggaaccccatctttgaggatctgttttgtacgaccactcctggacactagcgtatgagttatttttctgagataatttaagagaattgtttaagtagggtatgagatttctagggcttccataagaaatgccactcgctgggtgacttaaacaacagacatttattttctcccagttcgggaggctggaagcctaagatcaagatgttggtggggttgatttcctccgagaaccatgaggggaggagttgtttgtggcctctcccctccccttgtaggtggctgtcttctccctgtgtcttcacatggtcttccctctgtgcctgtctgtgccccaatcttttcttacaaggacaccagttatatgggattagggcccaccccaatgacctcattttaacttaattctttatatacactatctccaatcatcagtcactttctgaggttctgggggtttagaacttcaacctgtgaatttttggtggggcacagttcagcctgtaacaaacagatataggaggactgaaaaggcaaggcaagggggaaacattgaaataacaaacatagtaattgcaagaagcaactaccataaccttaggactagaggaataaaaggaagaggctggagtcatgagaacttagcagcttggagaaggagtcttacaggactggtgcccagaactctgaggggcagagggtatgagcagctggtactggcaagtatgaggggtagacaaacagacagatgccgggagcatgggataaatggagaggagcgtttcctttctctcccctttcatcttcagatcttgcttttgtgcccctcgtaggcaggacctaacaggtgtccgctggcaaaaaagaagtgtaatctgcagcctacagcatgacaggccatgttattgaaggatggatttttactaagacacaataactttaataaccaacacaggctgggcgtggtggctcacacctgtaatcctagcactttgagaggctgacgtaggtggattgtttgagaccaggagtttgagaccagcctgggcaacatggtaaaacccctactctacaaaaaggacaaaagttatccgggcatggtggtgtgtgcctgtagtcccagctactcacaaggcagaggcaagagaattgagcctgggagttcgagactgcagtgagctatgatcacaccactgcactccagcctgggtgacagagtgaaaccctgtctcaaagaaaagaaaagaaaaaagaaaataagcagcacagattccttcagcttcttttaaaaagtcgtatcttgctctgcagccttgcttttattacttagcagcacatacgaaaaagtctccagtgtccatcctcttccagcacatgaattctaatggctgcagagtatattccatcataaggatgtatcatcacttacttaaccaacttcctattcttagccattcggtgttttaaaattttgccactcttataaataggactgcaactcaataaatctaagcacacatccttaagtaatcccttaggattaatttttgaagtggaattactaaatcaaaaagtatgaggatttttcaggataaaaactcacttttctcagctatggaaaacgtgaattaagtgtggcttcttctgtcctgtagtacagtagggtgagattacaatgtactagaacatggggttgaggcaaggatttaaatactattggccgaaactgagtaataggatgtaatgatttcagagtgaaactaggcctactctttatgaaagcatttaaaggtgaggggacagttaacagtagcatctgccccagctggtggaaacgccatgttgttactgattttaatgcagttgcattcttagcagaactaattttgtaaagcatttctctaaataatccaattttacttggtgcttatggttggacaaaggagcaggcaggttttgtatcagtatttatggagtgtagccttgtaggaattactctggccagaggacattgctataaatctataatgatggttgtgtttttgattccatctttagtttctgaatttcagcctttgtaattaaaaatccatatcataaaattttggcctgtgacaattttatttttctcctgggatgctatgatttttctgaggcatgccttgctcggtccttcatggaggctaaaggtctgggggattttgagctgggtgtttggagcccatcctcatgacagatatttggcatgccagcttgggtgctacccttggaagatccgagtccaagcttttactggctccctgaggacaattctgagaaagttactatcccttgtactggtttctggtgctgggtatatacttgcttttgtaagactaaataaattgataaattcagctgattcagagcgtttacataatctttccaatgtcaacagtcatttaaattatcctaactttatactgaatctccaaaatccaattactagctaataataattgtcagttttactttaaacctttaatgataggtcacaagggaagtgtagcagcaggattaaatcgctgtagactgtagctatgcccagtcttaaattactcgcctcttatctctggctaacagagccactatatgttttgtcaccatttttgctaaatagaatatatgtcaccaaaattaatttcatctcccttaaattagcttcttagtgtgatttctcacttcagtcaaaatttatttcttcaggaatttaatttccttcttcatctcttttattcgagagagcaagactgttctggaacaaatgtcgtttaatcactggctggcaagttttgaggcttgcttttcattaataattgctgacccctttagggggagtgttggaggatatttctgttttatttaagctattgtatgcttttaaacagagtagactgggctctttctgaatagtcttagagaagctgtaaaccttgcatagaacaggaaagatgaatttaccacaaagaaaacatttttttcacatgagggatgattcagcagggagtttgtaattaggcactttagttgtttttcctactttttaatcattttcaggtatacacatctgacaatagctatcctttaagtaaggcatgtgtttggaaaaaactgtagggatttaaaagttaaacttctcacagaacacataaatacacagaagacttgcccaactctgaaatgcatcctgaagatacgatagtagcacctgtaacaaattccctttgctcatcaacagaaacctcaaggcactaaaacattaagaggcatggagagggagaagagagaggaagtgagaaagagagggaaagagagggagagggaaagatccatttctagaaaggcaaagtgcgaggagctctgtgacctgctccccagtgaagcaaatgtaactggtgaagataatgaaaaaatatccaaccattcggagtctctggatattgtactaggagaatacagcaaatgaagaaacagttatttaagagcaactactaaaactcaaaaggaacaatgggattctgtggcacttaaaccatgacctgttcctttcctcctccccgcagcttactttgaaggaagctctctattacaggtaggtgtggctaagaaggtggggctcccttgcccctcatctcccaatcaagggatatggcatcttacccagaagagcaggctgccaacatttcttattccctccgactctgagatgcagaagttaagttcctggtgaggtcagccaagaagtcagagactactgttctctgcccactccccccaactcaaatgtggcagttctaccacaggtgaagctaactgagaacacttgggccctcatcattcttgctcaagaatgatggggtggagggtccacactgggagaggcaagctgagaagactggagagtgtcatatctgcctcagtctctggagcagtggcttggaggtttttctcagtgggagagcagtccataaatacatagagctctgaagctctgaagctctccttaggggaactgtctttgaaacagagtgagggaagttcaaggctaagggtactttcttccataatgaagattttggtggtaattaagaggagactaataactccatgagagcaaaaacttacaccagaggcaagcaagtttactagagagaaccatggaaacagatagctaagaactctcctgggttcacaaaaaacctaaaggactagcctcaaaaacttcccctacccatgtacaattcagtggcatctataacattcacagtattgtgcaatcatcaccactatctctttccaaaacactgtcatcatcccaagaagaaactctagaatgattaaaccaacaacttcccatcccttctcccctatgatcatggattaacaattagctttcattagaaacaatggagaccagaaaccaataggatggcataatcaaagtgctggaaaaaaaataaaaaaactatcaagcaacaatcttatatccagcaaaactctctttcaaatatgaaggtgaaataaagacatttctaagtaaacaaaaactgagaagctttatttgctagcagacttcctttacaagaaatactaagggaagtaatacaggctgaaagcagtacaccccagacattaattcaaaaccacacgaataaacaaaaagcaccagtaaaggtaattatataataataaaaagatagtataaatacatattctcctttctgcccttaactaatttaaaaagcaattgtacgtaagcatggaattaccatataatctagcattttttacttctaggtatacaccccaaagaactgaaaacaagaactcaaacagatacttgtacacctatgttcatagcagccttattcacatggacaaaaggtagaaacaacccaaatgtccatcaagggattaatggataaaaaatgttggatatacgtacaatgtaatagtattcagccataaaaaggaatgatgtactgatatataatacaatatagttgggaaaagattattctaagtgaaataagctagactcaaaaggataaatattataggaatccacttaattgaggtatctaaaataggcaaatacatagagacagaaagcagaatagaatagaggttaacaaggactggtagcagaagggaagagtgaggacttgccagggagagaagagtaggcagttatagtttaataggtacagaattgcttttgggaaaataaaaatattctggaaatgtatactggtaatggttacacaaaattttaaatgtacctaacaccactgaattatgcacaataatgacaaaaatggtaaattttgttatgcacgttaaccacaataaaaataattaactctaaaaaagcaattatataaaataatatgtatgtaattatattattgggcttatatgtaaatgtaatatatttgacagtaacagcacaatggagatgggtgggaggaaacctgtattggtgtaaggaaatggcgccagatggtaacccaaatctataggaacaaatgaaaagaatcagaaatgataaatagaaagggaaatataacaagctctatgaatatatgcttactctcttctattctcttagcttctttaatagacataaaattatataaataataaaatgtattggtaggtttgtaatatatttaaatataatgtgtataacaatattagcacaaaaggaggaagatggaacagagctatataggtgcaattttaaaattttttgtgaaattaagttagcatatatctgaaagagattctgatgagttaaccactaataaaatctaataaaataactcaaaatatagcgaaaaattattaaagaaattatattacactagaaatattcacttaaagcaaaaggaagcagtaaagaaggaacagggaagcaaacacacatggggcatataggaaacaactgaaatggaatatgtaaatcctatataaataataatatcaaatataaatggattaagcaactgaatcaatagtcagagattttcagaatggataaaaaaacaaaatccaactataggttgtttataaaacacacactttagattcaaagatacagatagtttgaaagtaaaagaattgaaaagatgtatcatgcaaacaacaacaataagaaaattggagtggctatacgaatagcagaaaaaaatagactttaagacagaaaaagttactagagtaaaagaggacattttgtgatgataaaagtgtcaatttgtcaggtatgtaaaacaatcataaacatatagacatggctacatagccacagagccccaaaatacacgaaggaaaaactgacagaccagaagggaaaaataagctttcaacaataatagttgtagtgttcaataccccactcttaataacagatagaacaactagacaaaatatcaaggaaatagaagacttggacaacactataaaccaacttgacctaccagacatctgtagaccttccacccagcaacatcagaatgcacactcttctcaagaacatggaatagtctctaggatagaccatatattaggccataaaacaagcctcaataaatttaactgggtaaatcatgcagagtgtgttctctgataacaatagagtgaaaataaaaattaataaatttggggaattctcaaatatgtagaatataacacattgctgaattgccattagtcaaagaagaagcaataaagaaagttgaaaaacactttgagatgaatgaaaaagacacacaacataccaaaagttacagggtgcagctaaagctaaagtaaacagagggaaatttgtggttgtaaatgctactacaaactgagaaaagagttatctattcaataacttgattttccaccttaagacagtagaaaaacaagagaaaactaaactcaaagaagatagaaaccataaagagcagaagttaatgaaataaagaataaaaagcaatgaaaaaattaataaacccaaaagtttttctttaaaaggatcaacaaaaatgccaagtagttagctagattgaccaagaagactcaaatgattaaaatcaggaatgaaagagggagcattactatcaacctgacagaaataaaggattgtaaggcagtactatgatcaattaaatgccaatgaattagataacttggatgaaatggacaaatttctaaagacagactcaagaagaaatagaacatttgaatggacctatagaaagttaattgattgagtttgtaaacaaacaaacaaaaaacaaccgtctacaaaaaaagaccccgggcccagaatttacttcactggtaaattctatcaagcatttaaagaaagtaaatgttaattcttcacaaagtcttcccaaaatagagaagggaatacttcccaatttattctctgagcccaccatcattctgattcctaaaccagaaaaaggcatcataagaaagaaaaatatgatatttcgtgaaatgaaaaatccttaacaaattattagcacatcccatctagcaatgtgtacaaatattacacacaatgaccaagtaggatttatttcggtaatgcaagattaatttaacattacaaaaccaattaacataatacaccatatcagaagaataaaggacaaaaaccacatgactatctccacaccattaaaaaaaaagtatttgacaaaagtccacatccacacacattcatggtaaaaacattcaacaaactaggaaaagaaagcttccccaacgcgataaaggacatctgtgaaaaactcttggttaccatcgtacttaatgggaaaagattgaatgttttcccccctatgatcaggaacaagaccaagaaatccactatctccacttttatttaacattacagttaaagtgttagcccagaaattagacaagaaaacaaaatcaactggatgcagattggaaagaaagaagtaatagtatttacttgcagatcttgtatacaggaaattctaaggattctgctaaaaaaaaaaagaaaaaagaaaaactgctaaaacaaataaatgagttcagtaatgttgcagaatacaagaccaatgtagaaacatccatcgtaattgtgaaattaagaaaacaattccatttataatagcatcaaaagagtaaaagacttagaaataaacccaacaaaagaagtacaaaatctatgccctgaagaacaacaaaaacattcctgaaatacaatgaaaataacctaaataaatagaaatacatcctatgttcctggatgtaaagacaacagtactccacccacatttgatctacaggttcaacacaattgactctctagccccaatttcaaaacttattaaaagctacaataatcaagacagtgtggtactggcattggaatacacacatagatcaaaggaatagaactaggagtccagaaaaaagtcattgcatttacagtgaattgatttttgctgagagtacaaagataattcactgggggaaagcatagtaatttcaacaaatggcgctcaggtaactggatagtcacttgcaatagaatgcattaggaacctcgtgccatatacacctcacaccatctacaaagttaacttaatatattagtaaatcaaagccctaatatcaccactaaaagcataaaactcttagaagaaaacatagacataaatctgtgtgactttgggttaaggcagcagtgtcttaaatatgatatcaaaatcacaagggacaaaagaaaaaataagtaaattggacttcctcaaaatttaaaacttgggtgcctcaaagaacatcatcaggagtgtgaaaagataacctctagaactggagaaatttttataagtcatatatctgataaggtatccaaaatatataaagaacacctataactcaataataaaaagtcaattattatctcattttaaaaatggtcaaaggaattgaatatatttgtctccaaagaagatatagaaatagccaataaacacaccaccagaggctcaacatcattagccattaggaaaatgcaaatcaaaatcacagaaatatcacttcacatccactagaatggctataatcaaaaaagataaataataacaagtgtagggtgtggagaactggaaccctcatacattgctgttgagactgtaaaatgatgaagctgctttggaaaacagcttggcagtttcttaaaaggttaaatattgagcaattccactcctaggtatatacccaggagaggcgaaaacatacatacacaaatgcaaacaaaatttggtcattaatatctatagcagcattattcataatagtcaaagagtggaaataatctaaatgttcatcaattgatgagtgcataaataaaatgcagtatattcttacagtagaatatttggcaattaaaagaaatgaagtactgatatatgctacaatgtgggtaaaccttgaaaacattatgctaagtaaaaaaacccagttaccaatgaacatatatagcttaaggtaaattcatagagaccaaaagaatagtggttgcttagggatgaggaggctagggaaaagagtcagacattactgatggtgggcatgggatttcttttgggattgatgaaaatgttttcagattgtggtgatgattgcacaattctgtgaatatgcataaagttttgaatatatattttaacgtagtaaattttacgctatgtttattatatctcaataaaacttttatttaagaaaagatgaatacaggagcacccagatttataaagcaagtccttagagacctacaaagagacttagactcccacacaataataatgcaagactttaacaccccactgttaacattggacagatcaatgagacagaaagttaacaaggatatccaggaattgaattcagctctgcaccaagcagacctaatagacatctacagaactctccaccccaaatcaacagaatatacattcttctcagcaccacaccacacttattccaaaattaaccacatagttggaagtaaagcactcctcagcaaatgtaaaagaacagaaattataacaacctgtctctcagaccacagtgcaatcaaactagaactcaggattaagaaactcactcaaaaccgctcaactacatggaaactgaacaacctgctcctgaatgactacttggtacataacgaaatgaaggcagaaataaagatgttctttgaaaccaacgagaacaaagacacaacataccagaatctctgggacacatgtcaagcagtgtgtagagggaaatttatagcactaaatgcccacaagagaaagcaggaaagatctaaaagtgacaccctaacatcacaattaaaagaagtagagaagcaagaggaaacacattcaaaagctagcagaaggcaagaaataactaagatcagagcagaactgaaggagatagagacacaaaaaacccttcaaaaaatcaatgaatccaggagctggttttttgaaaagatcaacaaaactgatagaccgctagcaagactaataaagaataaaagagagaagaatcaaatagacgcaataaaaaatgacaaaggggatatcaccaccgatcccacagaaatacaaactactatcagagaatactataaacacctctacgcaaataaactagaaaatctagaagaactggataaattcctcagcacatacacactcccaagactaaaccaggaagaagcaaaatcacttaatagaccaaaaacaggctctgaaattgaggcaataattaatagcttaccaaccaaaaaaagtccagaaccagacggattcacagccgaattctaccagagttacaaggaggagctggtaccattccttcagaaactattccaatcaatagaaaaagagggaatcctcactaactcattttatgaggccagcatcatcctgataccaaagcctggcagagacacaataaaaaaagagaattttagaccaatatccctgataagcatcgatgcaaaaatcctcaataaaatactagcaaactgaatccagcagcacatcaaaaaccttatccaccatgatcaagtgggcttcattcctgggatgcaaggctggttcaacatatgcaaatcaataaatgtaatccagcatataaacagaaccaaagacaaacaccacatgattatctcaatagatgcagaaaaggcctttgacaaaattcaacagcccttcatgctaaaaactctcaataaattagttattgatgggacgtatctcaaaataataagagctatttatgacaaacccacagccattatcatactgaatgggcaaaaactggaagcattccctttgaaaatgggcacaagacagggatgccctctctcaccactcctattcaacatagtgttggaagttctggccagggcaatcaggcaggataaataaataaagggcattcaattaggaaaagaggaagtctaattgtccctgtttgcagatgacatcattgtatatctagaaaaccccatcgtctcagcccaaaatctccttaagctgataagcaacttcagcaaagtctcaggatacaaaatcaatgtgcaaaaatcacaagcattcttatacaccaataacagacaaacagagagccaaatcatgagtgaactcccattcacaattgcttcaaagagaataaaatacctaggaatccagcttacaagggatgtgaaggacctcttcaaggagaactacaaaccactgctcaacaaaataaaagaggagacaaacaaatggaagaatattccatgctcatggataggaagaatcaatatcgtgaaaatggccatactgcccaaggtaatttatagattcaatgccatccccatcaagctaccaatgactttcttcacagaattggaaaaaactactttaaagttcatatggaaccgaaaaagagcccgcatcgccaaggcaatcctaagccgaaagaacaaagctggaggcatcacactacctgacttcaaactatactacaaggctacagtaaccaaaacagcatggtactggtaccaaagcagagatatagaccaatggaacagaacagagccctcagaaataataccacacatgtacaactctctgatctttgacaaacttgacaaaaacaagaaatggggaaaggattccctatttaacaaatggtgctgggaaaactggctagccatatgtagaaagctgaaactggatcctttccttacaccttatagaaaaattaaatcaagatggattaaagagttaaatgttagacctaaaaccataaaaaccctagaagaaaacctaggcaataccattgaggacataggcacgggcaaggacttcatgtctaaaacaccaaaagcaatggcaacaaaagccaaaattgagaaatgggatctaattaaactcaagagcttctgcacagcaaaagaaactaccatcagagtgaataggcaacctacagatgggaaaaaatttttgcaatctactcatctgacaaagggctaatatccagaatctacaatgaactccaacaaatttacaagaaaaaaacaaccccatcaaaaagtaggcgaaggatatgaacagacacttctcaaaagaagacatttatgcagccaacagacacgtgaaaaaatgctcatcttcactggccatcagagaaatgcaaatcaaaacccaatgagataccatctcacaccagttcgaatgtcgatcattaaaaagtcaggaaacaacaggtgctggagaggatgtggagaaataggaagagttttacactgttgatgggactgtaaactagttcaaccattgtggaagtcagtgtggcaattcctcagggatctagaactagaaatatcatttgacccagccatcccattactgggtatatacccaaaggattataaatgatgctgctataaagacacatgtacacgtatgtttattacagcactattcacaatagcaaagacttggaagcaacccaaatgtccaacaatgatagactggattaagaaaatgtggcacatatacaccatggaatactatgcagccataaaaaatgatgagttcatgtcctttgtagggacatggatgaagctggaaaccgtcattctcagcaaactatatcaaggagaaaaaaacaaacactgcatgttctcacttataggtgggaattgaacaatgagaacacttcgacacaggaaggggaacatcacacaccaaggcctgttgtggggtgtgggggaggggggagggatagcattaggagatatacctaatgtaaatgactagttaatgggtgcagcacaccaacatggcacatgtatacagatgtaacaaacctgcacgttgtacacatgtatcctagaacttaaagtataataaaaatatatatataaataaaaaaagatcacaaactaaatattgagcttataaaataaattagaatgaaaggtttcataataaaaaaagactaaaatagaagttggaaacattggatgcaatcctatatttgctttttcctaccaatatgactttggaaaattttcttatttgtggaccttagctttcttatcttatgataatgtttgcaccagcaaggtcttagaggaggtactaggcaatgtggggcaagggagagcgactttattagtggttacagtgaccaaagagggctcctctcacaaagccagcttcatggtgtgtaacctgtgcagtcacaccccacgccatgctcagaagggcccaggcttggtttaattctctgctgtatgttttgaacaagggttcctgcattttcattttggggggtcctatgaagaatgtaaccaattctgatcctactgatagtgagaaggggctagggagcctttaatgtcctgcagagcacagggcagccctgtgcagtgaataattgccctgtccaaaatgccctgatgagaaacaccaaatgctaagtcatggttgaactctgaagggctgcaatttttaactagcttactagaacctaatctgaaatgttcaagaatagtgtgtgtttttcaaaaaatttgctttgatttatttcatgtacctaaaaagagtatgacgggtcgaaggcgactgaacatttagttcctcattttttttcctgagactgataatataccctatatgagccttatatgctttgaccttgcttctcatccattaactgagctgttgaagtttagatgattatagccttaacttattttatttctggttattagatttgttaagaaattgccaactcagtaggctctgtggcaaaaacaattatgattcctggagaatctctgatgaataataacgttctaagctgagcattttacttacattatttcatttaattttcccatcaatcttttaggttgatcattattatcctaactttatagataaggaaactgagtctcagagggcttaagaaagattagatgaaaatgatgtgtcttcttttttgacttctcaactgctattagatgaaacctgaaatccgtgagtttctttcattccttgaattttcccccagatgtattaggcctcactggaagaattaatgttggaatctactgatatatgttactgttatatacttatactgtagtaagcccctaagttggtgatattttcatgttgcaccaaaatttattatctacttggttgagaatataatactgtacatgataaaaatatactgaattaggaagtgcaagatttaatcatttctgaagtcatagaatagtagagctggaagaaattttaaagcactcctgtgccaatccatacatttcacagatgttgaaactgaggttaagataggtttaatattttttctgtattcacataatagatgtatggctttagtgacaaagccaggaatataatttatgagttaaagtgaattattggctcatcactcttcccaaacatttccttgcctccctttggtcagttttatctagatgaaataaaacaaccaatttgatggtttgacagatttcttcttcaatggaaataacttgcatggagtttagatagtctgtggatttcctgtaatatgggagttgtaacattttggagcatgtttaactcaacatagaggtgtcctctttcaaaaggacttcaacttaggtttgactctatgaataacccagcgaaaaataatttcccagtaagttcgaagaataccttaaaggtaatcatatgtattgagaaacagtaagtcctgccattgggacagcgactcaatggtatgaataataggatgaaaaagaaattgaggcatttagggaggttagaagggatattctaatttatatttttggatcaatttagaattcagaagcacttatttgtagcttattgatattcactttttgggtccattaagatgtaaagatggtcaattttataaattaatgtggatcatgaggacttctagatttcctcctgctttctacaattctattaaatgatatttaaaccaaggagataaagcttacgtatattttctttattcaactgtagacttaaaagaaaataaaactcttcaagatacatctcagacccagtgtttgatttttagattgtagccttgatatgctcagccttctccttctcaggcctctgcaatgggcctgaaatgaccttttattggcctggttcctttgatgaatgaactcagcacatttttgacagagatgaaggctggcttttttaaggccttctttagggagatataaatctcttgctgctttggagctgcatactgtttataaaccaaacttcatgcttccaaaatgagaaaactttcctccttctagtcttgcagggtctcacaaggatcactgcgcatgtttatcagcatttaaaagaaatagctaattatggggagtggtctaactaattgggcaaaggtctcaggtatacatttagctcttattttttatctccaactttctttgtgcaataggaaaacagattaatgtttttctttcttaattcaacttacagaaaatgtagggtcagattaactcataagaccctgcatcccagttcataagtcctttccaataacaagcccttctctatactgggcttctctaatatttcctaaggtgctgaccatcagccatccttacttcttattgcattcatactccttgggtaatacattcatttcatgaccccaaacattatatacctcattgactcgcaaatgtgtatttcatgacctccatgtattgcttgatctgcaaactatgttttcaactgactgttagatgtttccacctagatttccttcaggaacctcccagttaaacagaaatcattatcattcttgtgtcaacaccacccgtctctgcctgtccaattttttctcttcatatattttccttcttggttcataacatgataatcttatccagtttgggcaattgaagtaacttagataaatcctcagctcttctctcttgccacccattttataggtcattaaatatgccttttgggcactttttattgaagtattaacatacatttataagtatttacaaattttaagtgtgcagttcattgaatgttcacaaagtgaacagacctgcaaccagtaactaaattattcgcacacttaaatcccccttttaccccactgtcttcattatctctgcccatcaggggtacttcttacttagcatttaataaaatagaatagttggcctgtttttgaacttaagataagtggaaccatactgtatgtattctttttgtctggatacttcgggccaaaattatgtttataaaattcatccatgttgttgcatgtagcagaactttgttcattctgattgtctagtatgtgctggatgaatatttcacagttcattgagtcattctactgttgatgatggacatttgatttgcttccagtttggggctatagtcatgttgcaatgagcattctcatacctgtcatttagttcacatatttatatatccctgctgagaaaacacaaggtcttgctgtgaatagaatgtgcatttgttcagcattagcagatgttgccagatagttttttaaagtggttgtaccagctcacattattcagttcaattcagcagttgttccatacagcatgttgttcaataccaattcagcagcatatgagaattttcggtttctccacatgctcactaatactgggtattatgagccttgctcatttttggcataatgttccatatgaagtggtagctcatcatatagttctcatttgcattttccctgttggctgatgaagttgaacactctttcatacatttcttgaccatttaaatttcctctattgtgaaatggattttcagtctttgttcattttttaaaattgaattatcttattatgtcctagtttcaagttctgcatcagattatgaattgcagtttttccttcccacattgtagtttgcatttttcattcccttaatggtgtattttgatgaacagaagttcttaattttaatgtagcacaatttatcattgctcccttaatgatgagtgtttttaattatctatttaagaaatattagctatgttttacaacatttaaaaactcatttgatggtagtatacagacaatgacactctgatgggtaaaaggcagaactctttgttactggcagctccaaatcagagaaggctgccaggcagggccccataggggatttcacccaagaccatggtaacaacaagctggagctacacggggcagcttatggtaagcaggatgtgtttagctaggtcttccaagcttctcacggattgcctaatctgaatgatctccggggctccagtgtatagggactatccttaattgtttcctacctggttctggggcaataggggcaggcgcacagtggccttagtgtgtgagatcaaaatagtagaaatagttgaagtgtggctttaatcagctgctcagaaaggaaaactgattgtcctctagccagggcttcaggactgggtcaagaaaccattaaaaaaaaaaaaaaagcaaatgtacagactaccataagaagcattgctttattttccatatttaggtctagagttaatctgaagttaacttttttatgtgaactgggtgcaagattcattattgtccacatggatagctacttgattcatcacaatttattggaaaaaagttccatttgcaaccatgatgcagctgtttatttacctctctttctactaataccatgccatagtaattactatagctttataactacagcatctgtagggatcttgatgtcttaacatctgctcatgttactctttcagctgctgttgtacatttgccgttttcattgtcatatgctcttcctccttcttttccctcatccccattccctttcccttcttcttcctcctctttctcccttttcttactttttcttgtcccatcctccttcttcttcctctcattctccttcttctctttctctttttctcctttacttcctcctcctccatcttctcctccttctccttctacttgtcattcttcttttcctccaatttttccttaactgttttagaaattatttagaagttctttgcctttctatagaaatcttaaaggacatttctcaaaatcccaacattttaattagggtagcaatgaaacaatagagcagttcaggggaagaaatgacatctttataatatgagtctttcattccatgaacatgatatggctttctattgatttggtcatctttgattttctcctttggtgcttggtagttttcaacatagaatcctgtatgtattttgttagatttatacttcaatatttttgagccatttaaatggtattgcttttatttaatttctactgttgtacagataaaactgatttttgtataatgatctttaatctgtgatcctgataaaatcattttagttttatgtagttttctgtaaattctattaggttatctatatagacaatcatgtcatacacagatagagacatattatatctaacttaattggatttgtttatttctgtttatttatttctccttgcagtcctagtacttttttgcctcatgtattttgatgctctgttgtcaggtgcatacctgataagtactcctacactttctcggagaattcactcttttaccattgtataatgtccctctttatctccgataattttcctttactaaagtcagctttgtctgaaattaaggtatctagtacagctttctttcgttagtattagtgtatctttacatatcccattttcaacctgtttctgtatttatacttaaaatagtttttctatagaccacatgtaattgggtcttgttttttatctgcttcaacaatctctttcctataataggtatatttagactattttcatttacagtgattaccgacatagttggattaacatctaccatgtttgtaacttttccacttattgaacttgttcgttgtttcttttccccctctttttctgcctgccctatttttgactgagcattttatatgattctatatctctcctcttttatcatatcaactatatttctttaaaaatttttgtagtggttgacttaaagtttgtaatacacgtttacagctattctaagtttgacttcaaatagcactataccacattatggatagtgtgggtaccacataacagagtattcataattatttcacttatcctctatgaaattgctgtcattcatttcacttattcatatagtgttatcaccgaatacagtgctactattattacattaaccaaggagttatcttttagatcaattaaaattttttaaaaaatattttattttacctttgtttattctttccccaacactcttcctttcttcatatctatctggatttctgacatttgtcactttctttttccttcaataattattttaacatttctcatagaataagtttactggcaatgaatttttcagatttgtttgtgggagtctttatttcttccttactattgaaggataactccactgaaatatagaagtacctctttttgcttgcatagtttctgataagacatctactttaattcttattctgtttctctctcggggttttttactactgtgtctattagaagctttagtttgggactgctatagctcccaggctaggatatataaaaggcaaaaatgaaactatacaaacagaaaaagccaaacaggggctcactgaatctttctttgagtactgagatccttattcagttatcctgttgtgatccctttcagaatattctaatagatgcttcattatgcattttactccagagtttttggttacagatatggaggaaatagagtgacatatgcttactctatgttgtttgaaaccagaagtgacatttttaatactatgtgtgtgaggctaagtttcttgttaatatcctctgatacatagaaaattttttaaagccggcaatccacccagtgatatccataccgcaagttctgttttgccttctgtaggtggtaattccaatgtcaattaagtttgcacagccttttctatattccctgaagctgcccagtgcatgcattagtcaaggcttcatctaggacttgggccatggattatattgtggatcattctggataccttcactgcggtggtttttgtttagatttgttttgttttttggctctgtgctgcacgtacataggtcaagtttgattctgcatcttatgccatatcatacacaaaattagaggactctgttatctagctgtctcttaggtttttcctacaatttaggactctgaagagtcccttttcctgattattttggctaaaaatttgggtttctttcagggttttattactctacactgtcacacagtggggaccttctttaggttcttactgggactttgtttggagagatgtagtgggaattttaaaaaagagaaaactgatggataccacctccccactctttggacaacagaggctactttcctagtaactgtctcaggaaacaagtcctctttctgggttttatgccattatgctgctgccactgccacagctgccatggaagctcaggtctctggatgacactggccttgggagaggtctagaagggaaaagaagagaagggaaaagtgaatattctttggtcttggggggctcccagatacagttttaactacttctacttggacaactaataaagatgctaaagatgaacaggttattattgtgttgctagatatgtagattaagggcaatctactcttacttaaactttagataagatggaaattttttttcttgggcagtaacaacattaagaacggtgatgatgaaagtgtggttcatgatccagctgcatgaagtccctctatgaaggatgttgaatgtgcatatttctaggccttaactttggctcttgaatcttgattcctagatttgcattctgtattcctgtacacactaaagatttaagacattacttttagatggtgatgaacccctaagtcattgaagtttaagagaccagtagatgattatattattgtatgcggaagatatcaggggcttgaagttgggcctaggcaacagaaatgaaaaatacagggaaaatagaagagatattattgaggtaaggaggacacctgggaactgattaacccttgaaggtaaagaaggggtatgttaaaagatgactcagaggaagtattttggatgcatgtgagaatgatgataccataataagataagggaatgtcaaagtaaactctagatgatttaattagactggatttgagtatggggatttgagtaattctggcatgtctgtatggggtttttgagactctgtttaaggtagggttagtataagacacaccttccaagaatttacaatctgttagtgggattgagaaataaggaaaaaaacaactaaagctaacttggattgagctctttctatatgccaaacacaaatgatgttctaaacattttacatagataggttacgcaacttgcccaagatcacacagctactaagtgaaagagctgagatttaaaaccctgtgttctagactctatgcttttaatgtctatacaattaatattaccaaatttatggcaatttgacctctctagccatcagtttccttatttctaaattaaggataataatctggtagaatgtgtgtgataacaaaatgacaccatatacagaacctagaaatagtaggtgttcaaattgcatgatttagttctcatttttttaagtggttcagattttttaaaatgctgtttgaaaatactgtatctgtaactacaagaccagttttctaaactttcacttatttttggagatcttcatggtgcttcaataaaaattttataacactagaagaaaaaaattatctgtttttcttttccttttctatagctttgtagaactattattgaaagacaataaactacacatatttacagcatacaattgaataaatttggacttatatatatgagaaattatcatccctaaatttccctaatgacctttgaaattccttactccttccctgtctgcctctgcctctgagaaatcactaaatgacttatcttgttatagattatttcacattttctagactattatataaaaaatacaatatgtactgttttttctggcttctttcagtataattattttgagattcaaccatgtgtgtatcaatagttcatttaaaaatattattgctgacaaatatttcattgtgtagatatacaatagtttgtttcttcacattttgatgggcatttatgtcagtccaatttttaactttattaaaaataaagcagccatgaatattagtgtatgcatgctttcacatggtacatttacatttaactttttaagaaactgctaaactattttctaaaggaactgtaccattttacatttctaccagcagtgtctaagagttgcagttgctccaaatcctcaccaacacttggtatggtgagtctttttaattatcatattggtttgtgtatgttgaaccatccttgaatttgcgagatagatcctatttgatcatgatgaatgaagttttccatatgtggttgagtttggtttactagtattttcttggggatttttgcatcaatattcatcagggatattggcctatagttttctgtttttgatgtgtcttcatctggttttgatgtgtcttcatctggttttggtatcagaattgataccagaattagcatagcacgagtttagaagtattccctcttcctctattttttgtaatagtttgaataggattggtatttcttctttaaatatttgatagaattcagcagtgaatccatcaggtcccaggcttttctttgctgggagactttttattacagcttcgattttgttacttgttattggtcttttcagattttttatttcttcatggttcaattttggtaggtggtatatgtctagaaatttgtccattacttttagattttccaatttattggcatataattgctcatagtagccactaattatcctttacgttactgcaatatcaatagtaatgtctcatttttcatctctgatttttatttattttggtcatcgctctttttttcttaatctagctaaaggtttgtcaattttgtttaccttttcaaaaaaacaagctttaatttcattgatcttttgtattgtttttgcatttcaattttatttatttctgctctgatctttattatttattttcttctcctaattttgagttttgttgctcttgctcttctagcttctttaagacgcatccttaggttattcatttgaagtttttcttcttttctgatataggagcttatacactcccttgttagtactgctgtcatggtatctcctaggttttggtatgttgtgcttacattatcagtcatttcaaaaaatatttagattatactgcttgggtgataggtacaccaaaatctcacaaatcatcactaaagaatgtactcatgtaaacaaacactatctgttccccaattatatgtatatatatagcttccctcttcacttgacactcattctctctcctgctgccctgtgaagaggtgccttctgccatgattgtaagtttcctgaggcctcctcagccatgcagatctgtgagtcagttaaacctctttcctttataaattacccagtctcaggtattcataataaaatgaaaataaaaataaatttattcattaatttattcattgacccactggtcattcaggagcatattgtttaatttccagtgtttatatagtttctataattcttcttgttattgatttctagttttattccattgtgtcagagaagatgcttgatattagttcaatattttgagtgttttaagacttgttttgtcacctaacataagatttgtccttgagaatatgtgttctgagaagaatgtgtgttctgcagccgttagatgaaatattctgtaaatatctgttagatccatttggtctatagtccagtgtttctttgttatttttttggctggaagatctgtccaatgatgaaagtgaggtgctaaagtctccagctattattgtattagggtctctctctctctctctctctttagctctaatatttgcttcatatatctgggtactccagtgttcagtgcatatgtatttaaaattgttatattctcttgctgaattgaccctttttcattatacagtgatcttctttgtctcttcctatagtctttgtcttgaaatctattttgtctaatataagcatagctactcctgctcatttttggtttccattgacataggatatctttttccatcccttaattttcagtctatgtatgtctttataggtgaagtgtatttcctatagacaacagattattattattttttaatccattcagccactctgtgtcctttgattggagaattcagtccatttacatgtattattattgataaatagggacttgtttctggcattttgtgatttgttttctagttgttttgcggtcatctcttccttctttccttccttgctgtcttttagtgaaggtgattttctcttgtggtatgatttaacgtcttgctttgttttttgtttctattgtatatttttttatttgaggttacaaataatatgaggcttgcaaataatatcttataactcatcatttgaaactgatgacaacactaattgcatcaacaaacaaaaggaaaactaataaaaaatcagcacattaactttttcctcctgctttttaatttttttttgtttctatgtatattgtattataatctctatgtcttgaaaagttgttgtagttattatttttggttcattcatctttcgtcttcctacttagaataagaatagtttacataccacaattgcagtgttataatattctgtgtttttctgtgtacttagtaagaccagtgagttttataccttaagatgatatcttactgttctttaacagccttttcttcctgattaaagaactgcttttagcatttcttgtagggcagtctggtgttgatgaaatccctcagcttttgtttgttttggaaagtcttcaattctccttcatgtgaaggacattttcaccagataagctattctagcataaaagttttttttcctttggcactttaaattaatgttatgccactctttcctgacctgtaaaggtttcctctgaaaagtctcctgccagatgtgttgcagatccatggtgtgttatttttttctcttgctacttttaggatcctttctttatccttggcctttgggggtttgattattaaatgtcttgaggtagtcttctttgggttaaaccttcttagtgttctataaccttcttatacttgaatattgatagctttctctagtttaggaaagtcctctgttattatccctttgaataaactttctactcttgtctctttctctacctcctctttaaggccaattactcttagatttgctcttttgaggctattttctagattttataggtgtgcttcattattttttattctttgttaatcttttttcttttatattctctgactgtatatttctaaatggcctgtcttcaatctcactgattctttcttctgcttatcagctctgctgataggagactctgatgcattcttccttatgtcaattgcatttttcaactccagaatttctgcttgtttcttttaaagtacttgaatctctttgttaaatttatctgataaaattctgaattccttctcttcgttatcttgaatttctttgagcttcctcgaaacagctattttgaattctctgtctgaaaggtcacatagctctgtttctccagaattggtccctggtggttttttaagttcactttgtgaggtcatgttttcctggattgtctcaatgcttgtgggtgttagtcactgtctgggcattcaagtagtagatatttattatagtcttcatagtctgggcttgttggtacccatccttcttggatagtctttccaagtgtttgatgagatttgagtgttgtaatctaagccatatctacattaaggaacacgccaaacccataacactatgcttcttgcagactcatagagataccaccttggtggtcttcagtaagagctggaagaattttctggtttactaggcaaagactcttgttctcttcccttactttctcccaaacaaatggagtttccctctgtgtgctgagctgccatcaaaactgggactctgttgggttagaccttgtattaattcgttttcatactgctatgaagaaatacctgagactgggtaatttacaaaggaaagaggtttaattgactcacagttctgcatggctggggaggcctcaggaaacttacaatcatggcagaaggtgcctcttcacagggcagaaggagagagaatgagtgctgacgaagaaggaagccctttataaaaccatcagatctcctgagaactaattcactatcatgagacacagcatgggggaaaccacctccatgattcaattcttcaatcatgattcaagggtcctgccttgacatgtgggaattattacaattcaaggtgagatttggatggggacacagagccaaaccatatcagacctgaagccagcacagcactgagtctcacccaaggtccactgtaaccactacctggttaccacatgtgattgttcaaggccccagggctctacaatcagcaggtataaatccagccagactcgtgttcctctaggacacagatgggtccagagatgccatctgggagtcagagattggagtgaaaaaccttagaaatctacctgatgctttatttattgcacctaagctggcactcaaaccatgaaacaaagttgtttccactcttcccttccctttccacgggtagatgagccgctccctattgtcaccattaccacaggcccatgaggagtactgccagtttaccaccaatgttcgcttaagactcaagggctcttgggtcagcttgtggtgaatgctgccaggcctgggacccattcttcagggcaatgggttcccactctggctcagggtaggtccagaaatgccatcaaagagccaaggcctggaatcagggatgatcccatttttaagaagattatcctttgcttattgaattgccttggcatctttgtaaaacggtattcaattatgtacgtatacatgtgagtatatttctagacgttctgttttctttcattaacctatatttctatcttaatgccaatatcacatagtcttcatttatatagctttatatttagtcttaaataaatcagggtaagttctccaagttgttcaccgtttttgaagttgttttagctattttaggtcccttgcatttctatggcaattttagaatcagtttgccaatgtctaaaaaaaatcctgctagaattttgattgggattgtcttaaatctatagaaaaatttgagtaatattaaaatattgtttcaatccatgcacatattatatttctcttgtttttagatttatttctctcagcaacatcttatagctttgtttataaattgatcccttaatttcatatttctgtgctattctttgatttctgacagtttattgcttttatatgtacctttaattgatttttatgtgttgatcttgtattatgttacttacataaactcattttatagtcccagaagattcttttgtacatttggtgtgattttctgtatagctgatcatgtcttttgcaaataataacagttttctttctttctttccaatgtagttggactgttattgcacttgtttctgtttctttccttattgcactggtttaaacctccagtcatatgtctaacagaagtggggaagtggccatccttgtcaactttctgatcgtaggtagagtttttaactaaaaatttagtttttaaaatacacgatactactcaggctacatagctttttttttttttttaaatgactgttaatgttttgtaatttaaaaaaattttcaattttttcttagttgttaaaattattgacatgaaattgtttacaatgtccccttattatcccttaaatttccatagcatgatgtcacctcattcattcctgatattgataatttatctattttcttatttttcctgactgagtctggctaaagttacatggtgtttgtagtctttctcaaggccaactttggtttcatagatctttcttttttgttgttctcactattatggatctttgttctttattattatttctctactgcttacttagtgtttaatttcttcttttacaagtttataaatgtggaaatggaagtcattgatttgagatctttctttttttctaatatgacctctaatggtaaaaattttgctctgagtaatttttgttgcatcccacaattttggtatgttgtattttaatttgcaatttgtttaaaatattctctaagtattttggactcatatctctatttaatattttgtttctaaatattttggggttttacagttacttttctgtcactgacttctaacattattttggccagaaaatattctttgtctttgtatctttcttaacaatgtcacaatgtctttcatatagcaaatttttaaaaaaattttcctgagctctagtatgtcacattttcctctgatgaattgtattttttgctatcaactctaagaactcttttcctagtcctggatcatggggattttatattctggaagttttagtgttttatactttacatttaagtgcataatctattgtgctaaaattgtataaattgtgaggtttcgatggaggttcttttcatttcttatattttgttttgttttgctgatgaatgtccagctgcccatcataatttattgtaaactatctttctcttccattgaattgtttgttcctttattaaaaaataattgatcatatttgtgtagaacttttttgggttctgtatactgtttcattgattaatgtatctatcttgccaccaatactatactatcttgattattagacatatataataaaccatgacattgaggagagagatttctcccactttattcttccttttctttcccatataaattcaagaatatgtttctttatgtctataaagaatcttattgacaatttgataggcattgcattaaacctatagatcttataggaaaaaatatttttattcaacaattccacagtatattgagtcttccaattcatgaacatggtatacctcttcttgtatttaggtcttttaaaattactttcacctgaaattataaaatttcagaattttgtaatttttttatacaaattgtatatatactttattagatttatacctaagtatttcatgtatttgggtaattgtaaatggtattacattagttatttcagattccacctgtccattttcagtatatagaaaatgcaattgatttgtttgtattaatcttgtgtcctgacaccttattgaacttgcttattaatttcaggagttcttttatagactccttgaagtgttttatatagacaattatgctgtcttgtaacagagactttttttttcttttccagtttacctgccttttattttacttatttactttttaacatattgcctttcaagacttgttagttgggataaaaacagccttaatctacagctaattttgcccccactatatagagccaatgcctttctgggtcttgtacccagtgcaccatggtttactagattttccactctagttggtgggaacatgaactatcccagctctgtgtaatgtctgaagattgtttcctctggtcctttcaggtagttttcttctagctcttttctaaaaactcatgtagttgcctcccacatatcccctgactagtattcagctgaagacttgcaggtaactctctgcaactttccagagcttttttgatacagctctatctgctgcagtaatctgcctattgagatctagtcatcttaccctcccagctccatctcagcaaactgaagcaatgcttgaaaatacctcatttgttttccctctattaggacacactgtcctacgttgctctatatccaatgtctttcgtatattttgttcagtattttagttgcttcaggtgggtggagggtgggtatgaaagtgattcctgttagtttatctggttggaattgaaagtatcataaaactctatgttgactcagtgtgtttttgaagcttattgggtcttgattattacatttcaaactctactatctgtaagcaaaagagacataggccaagttatccttgtaaagaactcataagaatttcctgacttacctggctgatgcttcctttggggacattgccttcatgatcatatgggtgttggagtgtttgtcatgccaaagagaatctgcatgtgtgactaataagtcagcatttcaagaggcctggctatactctgcttaaaagtgaaaaagcactggattggcaggcataacaaggagaaagtggcattgatatggtaatagtgactttttaatggtctaaggaaagattccctctattctttaactgtgcattggtggtagggtgttgtgtaggtttcttgtctgccaaggcaatgaacagatacattatggtcacttttgtggattataatagggaaaatgatgattcgaaggaaagttaaaaggtatttaataatgagaattgtattagctttcaaatatctgttttcccttcacttacttccttgttatctcttcactgggagatgtgcttccatggctttcatcttttttttcccctcttttaaaagatatttcaaactttcttttcatacatttctcttatatattttaggcaagtagaagaaacccaatgttgtctgcatttgtgtagtttatgtgtgcccaggcctatatgactagtgttttgataacacagaatcatgatctgctttgacattccaaaattatggaggagagaaagtaccactctttgcacccttgttttcttgtaggacccttaaagactaatattaaaacatttgcccttctcaagacaattcaacaccccctcttcttcaggtaatgtctgccaccatgcccaccacttcaactcaagtataccccactgactctattcagtagagagatggcaaaagtgtgaaattgtattctcttccccctatttcagttctctttttgaagaggaaaccaaccaaccaagtttatatcttgaaattactatctgtgggatatttgcagctgagactaagtcctagtgctttcttaataaaagctatgcatgtaaatagggtcagcttttgggctgacattgcatttgaattaaaatctggcatctccacaccattgacaaatctgacagctggagcagcagtcacctcatcatatctctcagttgtgtctttcctggtttttggcatccttcctgtctaaatttttatcagatgagcacttttccttggcaagtactttaaataccttcaacttgttttatctctgaactgtaaccctttgccctcagatgtcatatctcacatgtatgactggaggatattcagaacaaattagttaagaatgcaacaccagagtgcaatttcatttggtcttctccctgccccatcctcttcccaaatattggagcttcctgttgaagagacctttatggacattgattaatttcatggaagctacttaatggtcttgcaaattggaacagttgtaagttttgattgtgacactgcagggctaactccacctgtgctaagcattcagcattgttttctttggctttgcttcattcacgataatcaaggacttgggttcattaccagcattagcaagcctcaaaggcctctcataaatccaagccaaacactgtgttaggaggttccttagattaatggcagccctggttctctgaggctgtgttgagatctgagagaaggtaatgttcactcggcttcagcatttctacttgtagttcaaagccaaacctggaggtacaggatgatctgcaggcaacaagagatagaatgtgggcctgcaaaaggtaccacctgtatacatgatgagctcttcctgcctggcacgcaaagaactttagagttttcctcaagccttttcctatgaaaactctcaggttttgtcagctgggtcaatccattgcctttccaatacacctggagcatttcttccttgatgaattaagggctgaacaaggatgcatgtcaggggtgaaaccctttgaagagtgcaaaaataaaaattggttgtttagtaagtagaaagataaatcaaaaccaatctataaaagttagattcatatctcttttcagggtcacaatttgcctttgttttctagcatcttcatcggtgcttgcaactgaaatgggtcttcttttgactcttggtctttccttagttaagggtgagggagactctttggttctccagcggacaaaagaagacagctaacaaataagtcactctttcttccatagtctatttataagccttacaagttaatgctggaaaggccaatgagaagaaaaataaaacaacagtagtagtagtagtaataagcatgatcatcatcatcatcattggccgcatttttagagaatttgctatgtaccaggcactgttgaaaagaaaaataactttactgagatataatacacattcaataaaattcattcacttgaagtataacagttcagaagtttttaatatatttacagagttgtgcaactgtcaccactatctaatcttagaacatttttgtcacccccataagctgccctatatcatgagctgtcactctccattcctcttgagcccccaacccctgtcaagtactaatctactttctctatatatgtatttgcgcattctggacatttcacataaatgcaatcatatagtgtgatcttttgtgcctggtgtctttcacgtagcatgttttcaaggttcatcatattatagcccatgtcagtacttcagttctttttagagatgaataatattctattgtctaggtacagacatgccacattttgttaattaccatcagctgatgaatattttgactagaattcaggcattatacttttatttttaacctttcattttgaattaatttcacactgttgaaaaattagtaaaattatttcttatacacccttctcccagatttcccagttattaacagcttatataatcacagtacaatgatcaaacatcgatacaatactattatctcatctaaagaccttattcaaatttctccctctgttgtactaacattctttttctagcacaggatccaacccaggatcacatattgcatttaattatcatgtctccttagtctttttaaatctggaacatttcatcattttttaactttgagactttacatttttaactttaaatatatattatttttatgttatatattttttagaaatagggtctcactctgtaacctagactgagggcactggcatgattgtagcttactacagccccaaactccttggttcaagtgatcctcctgcctcagccttctgagtagctaggactacaggcatgtgatactgtacctggctaatatttaagatttttttgtttagagacaggattttgttttgttgccaaggctgatatcaaactcctggctttaagcaatccttctgtcccagcctcccaaaatgctggaattacaagtatcagccactgggcctggccttagttttatattttaaaagctaagcacgcttactgcagaagaatatataaaacatgtaagacagaatgaatagaaatcacccttatttcattaccattagatggtcactattgacaatttgatctatttctgtccttctattcatattattgaaaatataatttatattctcttttaaaccagcattatatcatgaccattttccatgcattaagaactcttaaaaaacataatagtttcataatggtccatcttgtggttaatacatactgccctccagcatatctgtgatattaaacatttaggttttctctggtgaaacaaaatgaaattagtcaatgtgtatgaactgttttaaggttactaatttgtattgctaaaatgacttccaaaatgatgatatcaatataaattcccttaggactctgtgaaagcctgtttcaccacaccatcctcagcactggggaaattcatctttttccaatgtttgaaaaattaaattccactgtgcctttagtttgcatttccttattagtgatattaacttttaaaaacagttatcaatttgtgtattttctttggtgaattgtctctttgtatgcaaaatataattttttaattataaaagaaatcaaggaaaaggtatgctttacacactatgcttattttctgcctttttttaaaaaaaaaataaaagtaacttcaacatttattttagattcagaggggtacatgtgcaggcttgttacatgggtctattgcgtgatgctgaggtttgggatatggatgatcccatcatgtaggtagtgagcatagtacctaagaggtagtttttcagcccacactccctttctccttctcctctctagtagtctccagtgttgatcgttgtttccatttgtatgtctatgtgtactcagttcttagctcccacttataagtgaaagcatgtggtatttggttttctggtcctgcattattttgtttaggattagcctgccgctgtatccatgttgctgcaaatgacatttcattatttgtatagctgtgcagcattctaaggtgaacatataccacagtttccttattcagtctactactgatgggcacttgggttgattccatgtctttggtattgtgaatggtgcagcaatgaacattcaagtacatgtgtctttttggtagaacaatttattttcttctgggtgtatacccagtaattgggttactggttgaatggtagctccgttttatgttctttgagaaatttacagactgccttccacagtggctggactaattttcattctgacagtgtgtaagcatttgcttttctccatggcctcaccagcatatgtcattttttgactttttaatatagcaattctgactggtgtgagatggttttccattgtggttttcatttgaatttctctaatgattagtgatgatgaggattttttcatgtttgttgtatgttttcttttgagatgtgtctgttcatgtccttttcccatttttgatgggattatttctttattgcttgttgatttttttaagttccctatagattctggatattaggtctttgttggatgcatagtttgtgaatatctgctcccattctttaggtagtttgtttgctctattgatagtttcttttgttgtacagaagttctttcgtttaattagggctcacttgtctatttttgttttagttacaattgcttttggggatttagcccaaaattctttgccaaggcctctgtcatgaagagtatttcctatgttgtcttccaggatttttatagtgtgaggtcttacatttaaatctttaatccattttgagttaattttttacatgtggtgaagggtagtggtccagcttcaatcttctgtatatggctagccagttatcccagcatcatttattgaaaagggagtccttttcccattgcctatttttgtcagccatgtcaaaaatcagatggttgtagttttgccactttatttctgtgttttcttttctcttccatttgtctatgtgtatgttttcataccagtagcaagctgttttgggtactgtggctttacaatatagattaaggtctggtagtgtggtgcctccagttttgttctttttgcttaggattgttttggctatttgagctctttttttgtttcatatgaattttaaaatagtttcttctaattctgtgaagaatgacattggcagtttgatagaagtaaccttgaatctataaatttctttgggcagtatggccatttttatattgcttcttctaatccatgaccatggaatgtttttccatttattcatgttgtctctgatttctttcaacagtgttttggagttctccttgtggagatatttcaccctcttggttagctgtgttcctaagtattttaatttctttgtagtgattgtaagtgggattgttttcttgatttcactctcagcctggacattgttggtttatagaaatgctgctgatttttgtacattgatctttgcatcctgaaactttactacaatttttccttttttttctttcttttttttttgctaaagtggtttatgaattttgggagccttttggcagagtctttagggttttctaggtatagaatcattttgtcagagaagatagtttgatttcttctttgcctatttggatgccttttatttctttctcttgactgattgctctggctagggcttccaatactattttgaataggagtggggagagtggacatatttgtcttgttacagttctcccagggaataatgctttcagcttttgtctcttcagtatgacattggctatgggtttgtcatagatggctcttattattttgaagtatgttcttttaacacatagtctgttgagtgtttttatcatgaagggatgttggattttatctaaagctttttctgcatctattgagatgatcctatggcttttggttttaattctgtttatgtgatggatcacatttattgatttgtatatattgaaccaacctcacatcacaggaataaagcctatttgatcttggcaaattaactttttaatgttgattcaccaagatcaagtagaatttattctggagcctacggactggcgctgacattgtagaatgagtaagggaggagcccctcatccctgattttttagaatagtttcagtaggattggtacccatttttctttgcatgtctggtaaaatttggctgagaatctatctggtctggggctttctttgattggtagtttttttttttcaattgttgattcaattttgaatgtgttattgttccgttcaggttttcactttcttcctggatcaatcttgggagattgtatgtttccacgaatttatccatttcctgtagattttctaatttctgtgcatcaagttgttcataatagtctctgaggatcttttgtatttctgtggtatcaattgtaatgtcatctttgtcacttctgattttgcttatttagatcttctgggtttttttcattattagtctagctagagatctatgaattttgtttattcttttgaagatctaggtcttggtttcattgatcttttgcatggatttttgcatttcaatttcatttagttgttctctaattttaattatttatttctctgttatctttggggttggttcttttttttttttaagttcctctaagtatggtgttggattgttaacttgaggtctttctaacttcttgatgaaggtgtttagcactataaactatctccttttaacactgttttagctgcatcccaaagattttggtaagttgtgtctatattttcattaatttcaaagaattttttttatttctgccttaattattttgttcatgcaagagttactgaggagcaagttgtttaatttctctgtatttgtatagttttgagagatcttcttggtattgatttccatttttattatggtgtggtccaagagtgtgcacagtatgatatcaacttttttgaatttattgagacttccttaatgattgagcatatggttgatattagaatatgttccatgtgcagatgagaagaatatatattctgttgcagttgggtatagtattctttaaatgtctattgggtccaattggctgagtgtcatgtttaaatccataatttttttgttcatttctgcctcaatgatatgtcagtaaagtctgtcagtggagtgttgaagttttccattattattgtgtgggtcttcttgtagttgttttatgaatctggatgctccaatgttgggtacatatatgtttatgatagttaaatcttcttgttaaatcaaaacctttcattatgtaatgtccttctttctgctttttgtttgttgatgttttaaagtttgttttatctgatataagaatagtgagtagtgctcttttttccttcctgtttgcacggtagatcctgctacttttagcctgtggatgtcattacgtatgagatggatctctaaatgatggcagagagtttgatcttgtctttttatccagttggccactctatgccttttaagtggggtgtttagactgtttacattcagggttattattgatatctgagattttgaccctgtcatcatattgttagctggttgttttgtagaattgattgtgtagtttctttatagtgtctgtgggctatgtgcttaagtgtgtttttgtggtagcaggtatcattcttttgtttccatgtatagcactctgttaaggacctcttgtaaggttggtctagtggtaataaattccctcagtatttgcttgtctgagaaggattttatttctcttttgcttttgaagcttagtttggcagaatatgaaactgttggtatgaaatttctttttttttttttaaggatactggaaacaggctccctatgtcttctgccttgtaagaattctgctgagaagtccactgctagcttgatgggattccctttgtaaatgaacggatccttctctctagctacctttatgatgttctcttttgcatttaccttgatgattctggtaactatgttccttggggattgtcatcttgtatagtattttgcaggggttcttggtatttcttgaatttgcatgccagcctgtctagcaagattggagaaatgttcatggattaataataatgtcaatgacttgtaggtttggtctctttatataaccatatatttctcagatgttttgttcattttttaaaaattattttttaaaaaatttttatctgagtttactcaaataactggtcttcaagctctgagattctttctgtggcttggtctattctgctgttaatgcttcttattgtattatgaaattctcatagtgaattttttcaattccagaagttcagtttggttcttttttgaaatggctattttgtcttttagctcttggatcattttactggattccgtgaatttctggattgggtttgaatgttcttcttgatctcaatgagcttccttgccatccacaatgaattctatgtgtgtcattttagtcatttcaaactgattggataccattgcttatgagctagggtgcttatttggagggaaaggaacactctgactttttgaattctcaggtttcttgcatggattctttctcatttgagaggactggtgtttctttagctgtagcataagttgagtataatcaattggctttgtttctgggcgctttcagggtgccaatgctctgtacaggatctgtacttaaagctggatttttgccccttctctaggagctatttggggccaggaactgtccctgacatttgacaaatctatgcagggttcccagcttcctccctcttcagccttggggtctgcctcacctctcttttgactcttggtattttctctttgaaaatctgttcaaaatatgttagcttacccaatttttggtctttcttggtgacagcagtgcttcctgactgtgtccagttggacgtcttgtccagaacccctggtgattatttttaaaatgaagctttgttgtagcactcttggccaatttaatataatgtccttttttccctttataagttagccttcatgtcttcagtctacacttagacattcaggtcctaaatattacctttgcatattcagtatacaccagctccattcatagctgaacacttcaccaggttcctaattcctgaaagaacagaagccatatctgtatcccaggaggctggggcgacaagatggtggatctccccttattttcttttcatacattttttcaccaaaatttgacttgtatttgcagctatctgctatcaaacactagaagttattctttctcactgtatttttgtagctatcaaccaacttttcttcatccctctctcccctctacttttctcaacctctgttaaccactattctactttttagctccatggcataagtattttttagttcccacatatgaattataacatacaatatttttctttttgtgcctggcttatttaacataatatcctccagttccatctatgttgctgcagaatgacaggatttcattctttttatggctgaatattccattgtgcgtatataacacattatccatttatctgttggtggacatttagcttgattccatatcttggctatggtgaatagtgttgcaacaaatataggagtacagatacctctgcaatatatttatttactttcttttggacatatacccagcagtgggatttctggatcatatggtagttctactgtttataaattttttgtactggctgtgctaattctaattcccaccgtaagtatatgaatgttcccctttctctgcatctttaccagcatctgttattttgtgtctttttgataatagccattttaactgaggtgagttaataattcattgtagttttgatttgcagttccttgatgattagcaatgttgaacattttttttttcatatacctattggccatttgtatgtcttcttttgagaaatgtctattcagatcttttgcccattaaaaaaaaatcagattgttattaatattatttttgctattgatttccttatgtattttggttgttaatcccttggcacatgtataatttgcacatattttctcctattttgtaggttatgcattcatttgtttattgtttttgttttttgctatgcaaaactttttagtgtgatgtaatcctatttgtctctgagtcttcttatccttatcttagaaatgaatctaatactatttgtctgtctgtgttgttggctgtgcttttgaggtcttactcaaaaaatatttgctaagattgttatcctaaagtatttcctcattgttttcccctagtagtttcatagttttggttcttatattaagtttttaatccatttttattttatttttgtatgggctaagagataggggtctaattttattgttctgcatatgggtgtccagtttttcccacaccaatcattgaagagactatcctttccccagtgtatgttcttgatgcctctgtcaaaaatgagttggctataaatgcctgggtttatttctgggttctctatttttttccattggtctatgtatctgtttttgtgccagtaccatgtaactctggttactatagctttatagtacattttcaaatcaggcagtgtaatgcctccagctttgttctttttgctcaagactgctttgggtattccaggagaatgacatttttgaagaatactagccaattattttatgcaatatccctcaatttagaatttttagatgcttcttcatgagtaaatttagatgatgcatatttggccagaatagcatactgcatccttctcagtgcattgtatcaggaggtatgtgatatcaatttctcccagttgtggtgataccagctttgatcacttggttaaggggaaatctgtcaggtttctgaaaagagttcctgttttcctttgtatttaataagtatcttgtggggagatattttgagactgtgtaagtatcctgttccacatgataatctccttcactaagtttagcacctgttggtacttacctacaacagttattaccgtggtgtttgccaaatggtgattttctactctcatcacttcttatacatttatttctccaaatactgctgtgagaaagagtttaccatgctctcctatttatatatttacttatttataacattgtggtctcatggattcttactttattctatgggttataatccattactgttgttatttatgttgttgatcaaactgttttaagatttgcccattgggagactgttccatttgactcttgactttttttttttacatgcccttgttatttattgtgctattccttattttcttttataagttgatcttatacttttctttgtctggaattagccatttctccaaggaaatctgatgacttttactggaggaaggtacttagaaatcatgatctggaccgtgttctattttatcttctccctatgagttaggcacaattagcaatcctacatttttaatgaaataactgagaactcaagaagttaaataatacatctgatgccacacaactgaaggtgatagaactactatttgaacccagtctaaagtttggtctccagtgtccatacttaaatttaatttctctctgggattggaaagcttttccagtgtctctgagtcttcttttccttgtcttagcaatgagtctagtactatttgcctctcagtgttgttgtgatggctaaatgaaaggacacatcggaaattgtctatacattatttgttccatagtggatactcaaatatacgttgaatttgagctatattcactcagtattcataaacacccactttgttcgcagcactgaggtagaaaatatgcaggtacatgcatatttcctggtaagagctcatatttcctggcaataatttctaatgtcactccttcctgtgcatccaatataggataccagaatcctttccaagatagaatttaggcagacactactgaacaaatgaaacgtatttgctgccctagacatgagtgatgaagggttgggagaacaggcgtgactctaccaaaaacaggcagataatccaggctcacatttcaaaacaccttgcaacttaagtttctaaccattttctaacagtccttgaaattatgctaatataaggacttccaggcaacatagaagactgggtgtacatgctaatacacaaatgacatagaggatcagcatcccaacttcttggaatatgccagacagtaataaatgtaacagccacaaaattccagccttgcttaatttggggaaatgagaatcagtttgttcttcccctgctggcactgaacagtggtttgcaggatcactgcgtgggaaagatctgacagtagagatctgagaggctgtctgtgtgaaggctgaatttcatgaactatctcattgttgggatggttccctttcagcctcgtggtaagtacaacactcaggtcactgtaagcgcagggcaggcaagcttaagccacaatgagtgaaaatatgtgtgtattgggttgggggaagggattttagtctggattatctgaagctcagactttaagctgagagcctgggctgccaagcaggtatatgtaaaggacagctcaaagctgaggtttaaaactagtatgctccaaccaggctgtgaaagtaactaaagtagctgagtgcctcagatcacctaatgtttatttttgttttgttttattttttgtttttccatttttgttgttgtttgtttgttgttttttctgagacagagtctggctttgttgtctaggctggagtggagtggcacgatctcggctcactgcaacctccgcctcccggattcaagcgattctcctgcctcaacctcctgagtagctgagactacaagcgtgtgccaccacgcttggctaatttttgtatttttagtagaaacggggtttcaccaagttagccaggctgttctcgaactcctgacctcagggaatccacccaccttggcctcccaaagtgctgggattacaggcgtgagccaccacccccagccgccctaatgttttacaagtttgagacataaacctgtggcatgcttttttttgggaacatgattcagaaatcactttttcctatcaaaaagcagaaaaatgagccatgatgattggaatccttcctgatcttataggtagactgggaaagcatagctgggaagagcacagacagggagatcagaagaacctcggactgccacaaaatgtgtaatgccaggtaacctaagccagccagtcaatttatctggggatcacttcttcacttgtacagcgaacaagatgaattagataattgtataattccttggagctctgaaattctactgcacaaatagatgcctcgtgatcgctgttgagatgaggtcttccagagcctgtgatcccagatgtgattgatcatcttgccagagctttagccaccttctcacctgttagacaattcctgcccctgtgtctctactgtatcgcctttcacagctcatatgctgcacctatgcagtcttcttcagggtaagctgtgtgaagtttaagtttcttataactattaaacttcatcttgcaaaggattcttcctttgaagaccaggttgcaaagtaaataaaaatgaaactacacttgataaagcagggatgggaagtctgtaaccttatccttattgtgggatatttgaattgtctctattttttgctatttgtcttcaagttgtcctaagaaggtgggatcaatatcccccatcctattggttcagagtcaagactaatgatgccacacatgcatgaagagtgtatggaaacatttattatttacatcatgaggctttctagggagagcagaggaaacacccaagcttttctattagatttgagtgaggaaggcacaagtggctttggtttctactgtgtgtgggtgtgggctggcattagggctcccgtgtacaggctcaagtttacgtggtttgacttctatgctagtgccaaggaaaggagggcctgggatttttttttaattggcttgctcatgtgtgaggggaaaagagaagtgggagaaaaggggtctgaaagctgtcagcagccagataatggagtcagatgatcttacatattagaaaattccaaggaaaccactaaaaacctattagaactaatacatgagttagcaagattgcaagatacaagatcaatatgtgaaaaatcaattttctttctatacatttacaaagaactatccaaaaatgaaattaagagaataatttcattcacaatagtatataaatatattaaatatataggaataaatttaatataatgtgtaaaacttacatggtgaaaactcaaaacattaaaaaattaaagaagagcaaaataatagaaagtccatattcatgaattaaaagtcttaatattatcaaaatgacaatatttctcaaatttatctagattcagcacaattcctatcaaaatctcagctggcttttttttttttgcagaaattgaccagctaattttaaaattcatattgaaaagcaagggatccagaataacaaaaataatcttgaaaaagaagacaaagtaggatgacttgctggtatggtttggttctgtgtccccacacaggtctcctcttaaattgtaatcttgtaattcccatatgttatgggagggacccagtgggagatgatttgaatcatggggatagtttcgcccatactgttctcgtggtagtgaataagtctcacgagatctgatggttttatcaggggtttctgcttttgcatcttcctcattttctcctgctgccactatgtaagaagtgcctttcatctcctgccatgattctgaggcctccccagccatgtgcaactgtaagtccaattaaacctctttttcttcccagtatcgggtatgtctttatcagcagtgtgaaaacggactaatacactcacacttcccaatttcaaaacttcaaaaacagttatgaagaaagtatagtactagtatgaggataaatgtatagatcaatgtaataaagttaaaaattcagaaataaagccttacatttaaggtcaattaatttttgacagtggtgccaagacatttcaatgggaaaagaacaaccttttcgacaaatgatgatgaggcaacagaatatgcctgtactcataaataaagtttcaccccttccttatacaatatacaaaaattaactcaaaatggatcatagactaaatgtaacagctaaaatgataaaatttttagaagaaaacataggagtaagtcttcatgaccttgggctaaacttcttagcaatgataccaaaagcaaagcaaccaaagaaaaaatagtgacccttagaatcaccattaaataggaagatagtaccccttgtattatgggccttaatttctataggccttgtttttttaatctgtattgggacatattaactattttaaccagagatggattattctattttaggttcgtggtattccatttttttaagctgattttcaatgtcaaagatttaattttatttcaatttattactcattgggttaggtcatatctactacgtgatatatgttaaggcaacaggtgctaaggccatggagaatttagagaaggaaagtgtaccagtagtcaaggtgaggcatacctgtttgccctctactttgcatttggtaagcaccctaagagtatggtaactctttattacatatagatcaatgtaataaatttatgtttaaactcttaggggagttaccacatgcaaaatagaggacagtttaaatttggtgagatccccaaacataactgtaatttgagccacagaattagttaagaccatgaaggtttgccaattcttttcagcttagcagattttagagttagtttcaaaccctgtgttttaaaatacaaaagctaattggcatcctttttacttttcaatttttattatatatttttagtacattttagatttctaattggatcaaattatggatctctgttttagtttcccccaccactcacttttatttacttgcttttaaatttgacggttgctggatacactttaaaggggttgtgtcttctttgttcagatgtatatatacacattttcccttcagagagtaccaactcattatcatcaagctgagggacctctcccatggcagttgttttattggatagggtactggcttaagtagagtttgaattagccctttaacatgttgataagccacatcactcaatgaacaccgtgtctttgttggtcaattttatatataatagttgtctgttagtgtcctctggccctttaagtggggcagggataatgcattcaagtctacttctcataaaggtctgtgctttggcagccatggatactctttccctttaactttgaggatcaggttttcttttggtggcagagggataggcaggtcaggtatgtgtgaatgaactgttcctaggagtgtagacctcagtatgccacagggtgactgtttgtgacacaatggcacccaaagggtccatgtattacatagcttatcagtatcagtcttttctgtcattattgaataggattctttcctggttgagacacagaacaaatagtattagggtaagaattgtttccctgaacctatcataaaccacagcttatgctagaatagagatttaatctgaggcacaaagataggcccaggctgagacatatgacctagggcaactttaagtagcaccccaatcccatactctcgtccctaaatgccaatattgaaacttcaacttaggttgattaagtctatagaagaggcacagtaggactcagcaaatgcagctcaaaatacatgctaacctgcagccttccaaagtgtctacttgcctgccagaagcagagcctgttagcccaccaaaagcaaaggacaaaagctccccaggtgatagtggccatcacctagatcatcctcatcaaagggccagttgtcaggtggttgcttagcagagaagtggaatcaatcaccccctcccaaaattggttcagatgtcaagacggacaatgccacaaaagcaccaggaaggtgtgaaaatattcattacatcatgaggctttctggagagagcagggcaggcatccaagtcagtttgtttggcttgagtgaaggaaggagcaaaagcctttggttttttattgtgcttagggagtagtgttggggagagagttcccacatgtgtgccaatttttgcattatttgaacttccctccttgtgccaagcgagggagcacactggctttcttaccagcctgcccagatgtgaggctgggggaaaagtgaaggagtgcagcctgaaaactgtcaatggtcaaatatcaaaactggaatcacatactttattacgccatttaaagtaatgccattgtagcatgctggtgcacacgtcttcatgggatccatgaagaaatgggcttcctggaaagctagaaatatgaagatagtgcttttgttcaagtacaattggtactgactactacctctacctgcacaagaacgaagaaagttcttgcctataaaactgctaataaatggatgtgcataaattattgtaatatattcttctggcatgattatgcaagctttgagtgtaaagggcagttgtattgaaaaaaaatgagctgtctattaccttgcaaagacatgtcccaacctactaaacatgcctttcagggactctgagaactaagaaataccatggtatgctgtgatgtgctgtttctgcttctgttctgtgtggccacttcacttatgggacttaatctaatcctaaaatgtgggagtatgtggaaatgtttgttcttgtaactccatagttcattgaaattaagtgtaaagcatttctgaattagctaaatgttcttcagctaaatgtctagaaaataaatttaaaggccagtgtatctatcaaaaaaaggttttggaaactttcattagttaaatatgattatttggggcaaattgaacctcgaatttagtggtgtaatttcactaacttaagtatttaagccattaaaaaataatgaatgtatattagaaagtatggtagattagacactctgaatacacgtctttttttctcttttttttgagacagggtttcactctgtcacccgggctggagtacagtggcatgatcttggtttactgcaacctctgcctctcaggctcaagcaatcctcccacctcagcctcctgagtacttgggactacaggcttgtaccaccacacccagcaaatttttgtattttttgtagagacatagtttttcctgttgcccaggctggtcttgaactcctggactcaagcaatctgccgcctcggcctcccaaagtgttgggatttcagccgtgaggcaccatgcccagcccccatcctcttaaacagatcttatttctagataaataattattgttagtgcatttctgggtcagctagaaataggagctatcaccaaacaggagaaaacttaagaaaaatgccaagctgaaatcagagaaagaagtacgtgttttccccaaattcagacattgaaatatagagacaaagccttggacccaccatacactgggggatatgaataaaaaactcctttgttagatctggatccttgaagtttaatcaagtggtttcttatttgtagcacagatccttcctaaaagaaagtttcataagcttaggctgtcaagatttccacaggttgataaaaggcaaatatgagctcatgatcagaaattagcaaacacttaaggaaatctcacataagagttagcaaaagaaacagatttgaatgccaaaatggtatcagatattaaaattatcacaatcagaacataaagcaaatttgtatgaaatgattaaacaaataaaggtgggttaaaacagagaaagcaataagttttttttaaaattattttattattattatactttaagttttagggtacatgtgcacaatgtgcaggtttgttacatatgtatacatgtgccatgttggtgtgctgcacccattaactcgtcatttagcattaggtatatctcctaatgctatccctccccactacccccaccccacaacagtccccagagtgtgatgttccccttcttgtgtccatgtgttctcactgttcaattcccacctatgagtgagaacatgcagtgtttttttttgtccttgtgatagtttgctgagaatgatggtttccagtttcatccatgtccctacaaaggacacgaactcttcattttttatggctgcatagtattctatggtgtatatgtgccacattttcttaatccagtctatcgttgttggacatttgggttggttccaagtctttgctattgcgaatagtgccacaataaacatacgtgtgcatgtgtctttatagcagcatgatttataatcctttgggtatatacccagtaatgggatggctgggtcaaatgatatttctagtcctttttaacaagtaaccagtttgaaaaatatccaagtaaaactttcagtataaaaatattattgtatatactttaaaacccacagttaaatagactatcattgaagagagaatattagtaaactagtaagttgctctaaagatattaatatatacagaatgcaacactgaaataaccagaaatggaaagtctaagaggttagatgatatagaggcttgaatgagaaagtttttcattcaacaaatcaaagttccaggaagagagaataggaaaaagataggagagccatacttgaacaggtggcagctgagaattcttcaaaatgatgaaaaccatgaaaatatatacgatacatatggcaaagcatgcagataaacttaaaagccccacctaaccaaaaatattaaaactgcagagcaccaaaaacaaagagaagattttatgagtagccagaagacaaaagttacctataaagaaatgacaattagaaggcacaaggcagatttcttggcatcaaaatggaagcagggaagcagtggaattatattttcagagtgctgagagaaaaataaatatcagcttggaattgtgttagaagtaaatctatctctcaagaaggagtgcaaaataagaaatattggtatggacaaaatggaaagaatttactaactgtatattcaactaaaagaacttctaaagcaggtacatgagaaaaggtataaattatcctggaagaaaagtgtgaaatgatttaaaggaatcatgagaaaaaaatggcaaacatataagtaaatctaaaccaacactttctttattaaaacataatttgtagattttcacaaaaggacagaaggaaatcactgtcaaatgtaacatctaagtcaggaggaagtgatcagagtttaaatgttcaggcaaaggatttaagatattaatataagattttttagatcagcaatttgtgatatattttcacgaatcaccgccaaaaaaaagagtgtttaaatcccaacctagtgaagcagagaaatatatatatataaacatatatatatatatatatgtaatcaagaaaagagaaaaagaagcttagaagtggaacaaatacaaattccgaagtaatatgctagaaacatgtctaaagggatcaaccatcacaatcactaaatggactgaactcacaagtgaactaccgacattgtcctattagatgaaaaaataaataaacccaactatatatcctttaaaatatatgtatgaaaatataaggacacacatgtttgaagatataccaggcaatggcaaccaaaacaaaatgagaatatctatctatatatctgtctatctacctacctacctacctatccatctatccatttatctatcatctatctatctatctatctatctatctatctatctatctatctatcatctctatctgtatctctgtcgaatagaatatatctctcatatatagaattcaagacaaaaagtattactggggacgaagaggacctcatgtaatgatagacctttcgattcaccaaaaagattttttaaaatctaagtttgtatgtacctgttaaaatattatatttcatcatacctaagataccgacatttgtaagacgtgctgttattttatctaccactgtcaacagtaaaaaactcctgcaactaaactatgaaataatggtttcatattatgtcaattataagagatcttcattttgagatgttaaatatgaaaaaaactgtcttagaattaatgaagtatgatagcttcacaccacttaaagcaactatttatgtaagagaaaaatatataaaaatctacataacagtaaaagatttcaaaatatttctttcaattgtgatagctcaaacagaacaaaaaaagatataagagatgaataacaagctgattttaatggacatatgtagaactgtgcacagagaacacacattcttaagcatatatggaacattttttaatttgaccacatcttaagctataaaagcaaatgttaacaaatttcaaaaactaagtatcacatgttctctgactacaataaaattttaatttagaaatttatactaaaaagttaactagaaaaaccccatctgttggccaggtgtggtggtttacatgtgtaatcccagcactttgggaggctgagaagggtggattgctggaggaaaggagttcgagaccagcctgggcaacgtggtgaaaccccatctctaccaaaaatacaaaaattagccagtctcataacccagcctcaaaaaaaatttttttttgaaattgaaacacatggctcataaaaaataatggaaattaaaaatccctagagttgaacatttatgaaaataccgtatattgaaaaagtggcatgcattcatttataatgaaaatctgtcaaggaacaaggagttgaatggaactttttagctaaataaagagtatctacctaaaacaaacaaaacctatagcatactttgttcttaatggtaaaaagttagaagcatttcttgtaaagtcaaaagtatattcaaagaaaagtaaattttcccttccatccagactgtcctgcagagacaaaaacatattcatatatgtttggcagggagaaggacataaagagaaagattttgttttggtttggcttgttttaagatttttttaaatgtttgatatacggtgacagctttcccacaaaactgtactaattgaaacttctaccaacagagtgtgagagcattcatttcactacatgatcacaaacattacgtactaccattttaaaaaatagcaaaatgcctctttaaaaaatttatatgatgccttgtgggactcaacttgctcaatgagtttattgactatttttatttttatgttataaacagctcttcttatggagctgttaataatgtttgcttttatttgtaagaaatgtttactaaagtaggtaataatccttcagctgtcatagatgataaaaagcatactttttttaagtttgtaatttgggttttacttttttatggtgttttaccatggcagaggaaaactttttacatggttagacctaacaatattttcttgtattttttcttcctttgcttttattgtatatccctagagattggagagtctctaatcgtttgtggtgatcgttgtctaatagttacttttcttgtgttggagtatctggttaggattgcaaattcatttagtcctaatatttattaaacagtgcttcatttcctcactgatagaaaatatcaactttatcatagtatatattattttgtgatagaatcttgttcttttccttctattttgtaacactaatctttcagtttttttttttacaagttccatgttgtttaactattgcagcattatttctgagatcatgataattcttattactcaccctgattattcttttttcttttttgctcctttttattggatactgttttaaaaattacaaacattatccaccctcttctatttcaagatgacgtcaactattctttttaaatgtattaactaagaggaatgcagaatcattttctaaagttaaaaataaaaacttgtccaatctctgatatatttttttaatagtgtttgacccataaaattagggacatctgaagtaggattctaaagtaagaaatatacctgtttgtttggaaaggtagaaaggaaatagttacattctcacgtaaccaaagttttaaaaaattatctagtgtcatttatctgacattatttctctaaagtgcctcatcaactccagccagacaaatctcttcattattcctgcttcaggccatgcacatttcaaattctcaggctttgctgagaatgttctttgccagggatattttttctctttctttctgtttattaaaatttgtttctttaaggccaaactctagctccttcatcatgaagcttcttttagtatatgttccacagagtttaaacattttagaactttttctaattataaaagcaagaaaataaactcatagaacatttgataaaaaatagagacatattttctataatattaactccctattatgaattatatatatttccttgcagtatttcatatgaatacatagttgtaactctagtgaacttacaatttcatgttctatgttagcatggtttcatgcttttctctgttgctccattctattcattattaccatttttttttttttttttttgagacggagtctcgctctgtcgcccaggctggagtgccgtggcgcgatctcggctcactgcaagctccacctcccgggttcatgccattctcctgcctcagcctccagagtagctgggactacaggcgcctgccaccacgcccggctaatttttttgtatttttagtagagacggggtttcaccgtgttaaccaggatagtctcaatctcctgaccttgtgatctgcccgcctcgacctcccaaagtgctgggattacaggcgtgagccaccgcgcccagccccattattaccattttaatgactatccaatggtccatagagtcaatacataattatttaaataatctttgctttactacctgtcccttatcataaaaagctctgcagagaaaatctttgttgtgtagctttcctttctttggggaattagttccttagaataaacatcaagaattggaatttaggggagagaagcgaaaagcattttcaggctcttgaaatgttttttcaggtggctttcattcaccagttttatgtatgagagttctagtactccagttgacttgattccctcagatataaatattttttcgttattatttaagaggaaaaaagcatgttaagcattttgccccaattctctgttattgtgtattagttagctctcatgtattaattttgtttccccaaagagactgtaaggtccttgcatgagactagagataatgacttatatttattctttataccccacaatatctccccaaaagtgtggcagacacagttgtcttcagtatttgcttcttaagtgattgaaaccttcacaaaattcctttttgttcctcaaactcaaggccaattatgatagaaaatttggcaagtagcatatttgtggagtctcagctccaaaaataaacccttacccaaacctcacttgtaggggttaaacttatgcttggaatcaagattaactgaaattttcaataaacatgtgtatattgagtttttcttgaatttcagactcattttatcctagttcttatccaattaattcacaaaacataagctatttaaccaccaccattttcagagattgctcataggaagaccaaagaacatagccctagtcctctaaaactggtgtcctaggatgctagaaagtcccttgcctccacaggaaagcaaaaggcaactataattgaagtaccctattgccatgtgttttcagctacacttgttccccactttatcctagttctagaacggtgccagggatatgataaacagtcaataaatatttgttgagtggttgaatgaatctgtgtgcataggttgaatgaatcaatcactctgcaaatatgtattgagctctcgcaagatgcaaagcccagtgtactggttactagaaaaacagataaagttgatggatcttatacgtggcagtgggctggatttaatgaccttgaggtttcatccagtgcatttttctacaactcatgtgcatttcttttgaaacttacacgtcacatccacaagccgaataaaactcctcaagctgcatttctaggatgatcccccgccacctctccctgagggcctgaaaagttgtatgctgctgatttctggtgcgggcaactcctgggcagggacaaggatggctccagatggatggatgcctttgtggagggctcccttttatccttagttgtaagccgcctgagcagttatattataaatgggtaatttaccgcctcatccccaaggcctcttctgtgggctctttcatggacactgttaccaaaagttaccaatatgcctggtgcctttgatatttgtgggcactgcagaccagagaaaaagagttgctgccttgtacagctgcacactggctttcacatgtcctgcaaatgggtacctgccagccatcttccccagatgtcatactgaccattgatttttttttttttctgcttgctattgcagttattaactacagtgaggcctgggcacttagctctccactttaattattcatccttatgaagaaaaatttcccccgtgtgctttattgtcctccagccccgacctgagctcacgcagactcttccttctttccctccccaaagtggcttgtgtgtcgaagggctttccactggggtgcttattccatttatgcctttagtatgcattttgtgttctgccaagggggtcaggagggcacatggagaagccagatggcttacctcttccctcaggaaacacgccgctatttagctgggcaccttcccaactcaaggcggggtgagattccactgttggagagagagttggttcaaatgccactgtccctgagatcacagctccaagttcctctaggctatgcacttttctacttctctgccacttgctggagttttctgccagaaacagccttttaggagatattagaaaggggggtgggaagggagggatgggaaaaagcaactcttgttatttatggtcctcgttcaggcacaagtttctgttattttaatccggctgaaataagaaaccataatccatggatgaaaagatggtggacaaactcagttaaatcttgagcaccctgaggatgtgtgtttttccctatttctggtttttgacgttccttccctgctgccatttcccaactttaacttttgaaaagccaagcagtttggctggccaggcccagggaacttatttgtatgcagcacaaatttcagaatctgttctcagcctgtgccgagtgaaaaatggcctgcattttcttgatagcccatgtggttgtaaagaataaatggctaatgaattacagatgaacattgacgcaaattaatcttcccgctgtccctgggttatatggcagccatttaaaagtttaatcaatacactaaagttgaaaacatgcaggcactgcagttgtttggatgtaataaacatcagagggaaccgggaggtttgcacccagtccatgtatcataatgacaggtatttatgtttaatggactaaatattttttattggaagggagcaaatgtcagcttaactttgtgagccccgcattcaactttcctttgaggttggtgaaagacggctgacgtgtcattggaaatgaaatgttaagggagaaaaaaagcacaacggagacaaagcgaggatgggagccgtttggagacgtggtgcagcgcttacattctgcagcaattcattaacgaaaacgtaaactctgatatttctaatgttgctgtaaaatggtttactaggaacaactttaatggttattagtgaaaacaagtacccagatctgccagatatccttttcagtgcaggcttttgtttgaaaactctttaccaggtcatatttgctggagatttataattagtctttttccttaatgtgagaagtggaggagaaacagcgtgatggctctcagctcttgtattccatagatctttccttttgaacggtgtccaatgacttcgaataaccatgtgttctcttttggaatacttatatcttaattacttttcaagtcaatattttgtacctctgccgtgagtctggaaggaccagggtagctaaaagagaaaggaaattgccagtggcagtgccatctcgctggacaaaaacaggctgagacacaggagagcaatggcttcacttgaacagaaaaatacagacttagttcagcttttcattttttttcctccacatataaaataaactaaatatgtcagtggagcatggggtcttagaaaataacacacactttataaaaataattagaaacgttttagacaaaggatatcgtgtttttaatgtcccttctgcaaccaattgtctcaggtcctcttcagtgtctgagggcacattcaatggcagggcttggaagaaaattattcagtagatagcaagatgaggctgaaggatgagaaaaagggacaggggttgtgatacttatccagtgttcagatcttgcaaaagatatgaattgcacctttttatgtgttaaataattttgttaaaatcacaagaatttgtgtttctaatgggcctaagtttcataggtaatcagtattatgtgatactaaattagtaaaccaaactgatgggttcattggtccttcatcatcccttaagcaaaatggggagaaactttctgttatgaaaaccgaagcatggctcactgttaaccatgatgacatctcacccactactgctcctgaagtcctaaactctatttttcttcctacctctttctaccctcttagaggattgagtcctttacctgtttgttcactttgtgtttccgccgtgtgaatataagctccacagtagggggtaggaggcaagaacctgattttcttctttgcttctagtgtcctggggcctggcctataataggttcttgtaaatggcaggtaagtgaatggcggactacatttcttatggtctttagtaatttataactccggctattttttttgttagtcagtatgatttctagtcactgtgttagttgttttacatataatacaatacttgatcttagttgttaactctagaagataagagttattatcttcattttatagaggcaaaaactgatgtcaagagaattgaagctaattatttgtggttactgttagtatgtagcaattccagaatttgaatcctgacctgtttgtctctgtatcagctatacagtactccccaaattcctgtcactcatcttgtccctggggattaaaatctcattaagtgaccacaacatttaattctagactataaccagccagctccccaactggctgataatgaacagaagtattagattcacaatttgcaacctaaacctggtgtcctgagtcctacctatagaaagcaatctttgactgtacaaaagtagcacattggctatttgatgatgggtgatatgtcactcaaatatgtgtgttctgtggtctagggaaatacaaggaactctctcaaatcatgagaaaagtgttcagcaacagaaatctaacaaatagtgactgaaatgcataggcattaatttcttcactcagaagtgagaatggaggtaggcagcccaggacagtgatagtggctgaaagagcagatcagtaggcacccaggtcctttctgtctttctgtcctactaccttttcagcatgtgcattttagcctcatggtctcaaaatggttgctactgctcctggcatcatttcctcacccaaagcaagatgaagaaggatgtctttcccttatgaggcattcgcttttcatttgtggatagacagcttcctaaagatgtctgtctctttctcattacccagatcatgtcattgggaggctggaaagtcaaatgtttcagttttcatgctgttatagtagaggaaggcaggataaaagggagccaatgcatagtgtctcctatgtaagataaatcgcattttttgtatacctaataaagacttgaaactttgctagatgccatatgcacatcaacttatatcatgtttacaaccaccttgttacagaagagtatttattcccattacactaagaagaggtgatctcattgttcaattcccacctatgagtgagaatatgcggtgtttgaaggggaatatcacactctggggactgttgtggggtggggggaggggggagggatagattgggagatatacctaatgctagatgacgagttagtgggtgcagcgcaccagcatggcacatgtatacatatgtaacctgcacaatgtgcacgtgtaccctaaaacgtaaagtataataaaataaataaataaataaataaataaataaataaataaataaataaaaatgccctaaattatcaggtctgacaaaaaaaaaaaaaaaaaaagaagaggtggagctgggatttagagctacatttgtctgtttctatcataggtcttctctctaatgccatgtttctttggccaccattttgatgtcatagtgaaggatgatttcatagtgaaggccattcccagttgttccagctcatggtgaatgtgctgtcttctgagggcacttaacagttgggtctgcctctttgataattaagtatgcactaccatgtgccagcttccatttttgtgtattctgtacagagtgtttaagaaggtgggtcagagactcactgtctagatccagatcttggctctataagttactatcagtgtaatctcatgcaaattacataacctctctgcagattgaacttttggagaccagggacatgattttttttcccctcttgatatctcctaaaacactgacaagattctatttcacattagagccactgagtaaaaactcattctagaatcactttgaatctttgtttcattgatttaacatctttttgccttagcttctgaatcctaaaatggggacaagaatacatctacttcatagggttgttgtaatcgttgaatgagataatgtacctacttaaagtttttagaacagtgtgtgatgcatagaaaaagctcagtgttagctataattattataatcattcatggattgccagtattcaaactctaaaactccatgggatataatataatctgtaatgtatccaaaagcaatttttcttaggccatctcaggtacactattataaagaataaccatatccttctggtgaagccatattgagcatctcctgcaatccagggagtgtggtatatgttggagatacaaaaatgcataaaacacagtgagaaacatgtggtaatgaacaccatgagcaatattcactctcgataataaccaaatgcttaaaaagtaaagcaactcttggatataatatttccacttattaaactagcaaagatgtttaaataggcatgcctggtgctatggagtggattgggtgcatattaatatgtttttgaaaagcattttggccctgtgcattgaggctagatgcattcacttaggaatctattccaagacaagaatccaagatgcataaacacaggatctttatacactaaaatattcactatagtaatgtttgtaacatcaaaacacacaaaaagtcattatccaactagataagaaagctaaataaattatggcacattcacagaacacaatgttatatagtattcaagtgatggttacatcagatttaatacgataggcaaatatttaagtaataaaataaatgaagatggatatatatgaatgcatccatacaacatatggacagaaaaaaggccagaaggcaaaacatccaaatactaactgtggttagttctggacagtggaattatatatgatttttattttttaaatttacacttaatttttttacaatgaacatttaaatataataagaaaacaattaaaataactccccaaacaacaatatagtctttatgaaaatagtttcagagagaaggggagtgataataacaaaaagagtttatgtgagttagttaagaattgtattcagctacaactagccccaaataccagtagctttaagaaaatactgtcctataacatgaatttcagatgtaggcagtccatagctgttatgatatcactaggaacacaggcttctttgattttggttctatcttccaacagactggctcccatcctcaagtttgatttatggtcaccatattattgctgttgcactagctcttctttccaagttccaagtagcaggaaggaagaaaaggcaaggtgagcactgctatgctcaacagcataggggctctgtgtataagatgaaagaggaatatagatactgggtagccggccttactttcagattttaataataactctgccattcaacagcaggttgacgttaagaaaatctcgcatgtcaatgacaccaaggaggcctccagaaccttctgaatacagtgccgtatgcaaccactgtcatcacctgtgcttggtgatgaatctcatttgccattccaagcctctgttacctcctgtgcttttgtttcctcctctttaaaataggcatattgaaaattcactgccttttatgattgtggtgaggataatatgattttatagttgtgaaggtcttttggaaaggcttagtatgctatgcaaatgtaatttttacaagactcatggcagccaatgggaattaagggctcactaaatgctattaatagtcactgctgaactccttatgtgcagaatttcatttaatttggggaatgagacattatgagtgtccccattttacaggtacagatattgagagacaaagaaatttgcacccaagttatctgcctcttgattccatgacatttgttctcaatcttaagtgtgcttaagaatcatagtaagcctgttaaaaatgtagatgtctaggatcagaaattagattctgctgcaggtggcctgcaaactacaattaatggctcagttctacctactctaaactcttaattatccagcaatgtggcaaagaacatgttcctcagacagagctcttcgggctcctgaattctactctgacttttccttgatcttctctggtagggagactatagctcttttgggtagaaaatgcccttttggcaagaaaaacttgccagttatttgggaggctttgtcttcttacatggaaaaaggtcactaatttctgaagctacctcctgtacagtagtatgagaatcctcagaggtaagaagacttgggccaataggtttgactttgttggttggattttcattattttccaaagagaaagtctttgaggccaagcataagggctgatttgccaatgggacttagtttccagtaagatcaagagtgtctaccacacacctgacttttgaactttcctcttagcccactaatagcagaggtgcaatgaggagatcttcatttggcaatggataggctcccaaaacagaaagcatggacatgccatttaaaggtcccaggagattgatttccaactggaatgcaggaagagtctaagagtaactgaaatttggaaacactgctagttatttttaagactactctttcttgaaatggatcagaaccaatagaacaaaccacaggttgtgatagatttatgcactgaggaatataggaagagaaagtaaaaactatgggcaaggattttcataaactgcatcataaattgatttggtgggccccaaggagaacataaacactatgcccaaggactcagggatttgacttttgtttagatccattttataggcaatctgtaaaaggaaaaaagggcaaaaataatattagttatctcataaagttgtttaaaaatcaagtgatgagaataatctatttaaaatacttatcacagtgcctacacataggaagctcgataaagttagctatgatgatgactgtaatgacgaggaggagcaggaggaggaaagggagaaagagaacgagagaggcaagaaatctgctaaggttttgctccatgaaatgtctttcagttgaaaattctcattgaaacagagaagctttgtctttataactagaagatgcagtttgaaaattgtatcatggaatgaaacacaaaatgtttttcattccatgaaagaattccataaaagagctagaccgtactccacgtggtgttctgcacatagaaggtgatcaaataaataactgattctgtgaagggctaaaggagattttcagaatgtgccatgcttctggggacaattggctttctgctatggtctcaatgctgatgtagaagataattctatgaaaagatcctcagaactgagaacttctgttttttccatgttaatgtttagatagccagaggacttatcattctaggtttgggggcagatattttgctatgcctttcctgttactgttagaaagaaaatccccacccctaccccgccactgtcacagtaataaagcactgctcaatgtgtctttagcacttcctgtccttgggaatctgcctactgcttctctaatatgggagagaccagcccctgtgctgaagcagtcagggactgtaattaccttaatacccagtaatggatcgttaggatcatgccacacagtccctatggtacaagagactcggaaattcaagatgggaagatgagaatatgtgaattgaatgacatgggtgagagtaaatttcccatcttttttctagtggaggaaatgcattaagtcttttgatactaaatatgatgttagctatagtttttgtttgtagataacttttatcagtttgaggagcttccccttttttcctgtgttgctgagagttttatcgtaaatttatgagtgctgaattttgtcatttttttctgcatcaattgaaatgattttatttttttaaattggttgatataaatatatcagttatatttatttttgaatattgaaccaaccttgcatctctaggataaagtgtacttggtcatgatgtattctactttttatatattgctgaatcttatttgctatgtgtattatggatttttgcatgcacattcatgaggaatattgtccagtacttttccttccttttcttgtaatgtatttgcctgtttttggtatcagtgtaatgctggtttcatggcaagtattcctaccccttcaattttctggaaaagtgtgtgtagaattgctatcattctttattaagtcattggttaaatttgtcattaaaaccatttgggcctggagttatcttcatgggccaatagtgaactctgcattcaatttctttaatagacatacaggccttcaggttattcacttcttctttagtcctaagctctttttttgaaaagatacattacacctccttcaaacctctactttaagttctggggtacatgtgcagaacatggaggtttgttacataggtatacgcgtgccatggtgttttgctgcacccatcaacccgtcacctacattaggtatttctcctaatgctatccctcccctactcccataccccccgacaggccctggtgtgtgatgttcccctccctgtgtccatgtgttctcattattcaacttccacttatgagtgagaacatgcacaaacctctacttttaatcattgtggccatcacataaccaaagtgttaattcacggcttgactatgaattcttctcataaccttctgggccttctgtttggtaaacagagaaagttagttcctttatacatttatttattcattcattcagcaaagattggaaccatattttgaattgtaggacatgcaatacaggttgtggtttcaaagatgagtcagacagtatccttgggttcaagtaaatttcttttaagagggagtaatagcaatcaaatgcttgactgtgctgcagtgggatatgtgtagtggttgtgtgatgggtagtgcacagaaagagaaaacaaggaaccattaattctgccaaggggaaatcagagaagtcttctaagaagaaatggcattttatttgggccttgaatgataaggagagttttatttggcaaagaggagtcttgtcatgtgaatcatcatgggaggtttggaggaacaagccatttcagcttttcctagggttagaacctttactttaggaatgcattgttttcttcttttgattgggaaaaccaaaatctgaatggtaaatttaaaagttacattgctttagttatcacagttcttctaattgtgtgtttctcagatgaatatgacatgcctcttacgatcttgctacagagtggattttatgttaaattatggcttcctggtgattctcagagttttatatcccatttttatttaaattattttcatagttgtaataacaaataaatttcttattcaaagaagatgcagcctttgaaatggatcttaatttgaatgttgacattccagtaacaaaacaaaaataaccacttgtagatggagagcgagagcgagagtgagagagagcgagagagagaatgaatcacaaacacctgtaaagtgtaactattagtttcaaataggatattattgaatctgtcctaaaaccagttgattgtgattattctaaattttaccttgagtatattgaccatgacaggccaacttcagttcctatatccggattcaactggattcattgcactttgattctaccatgaaaaacaatgcctttgtgtaaagtcatgagcacttctttcccttcttggttaactgtgtttagatctttatcatataagacctgactttatgttcattgttgaaattgttgctggtttcttttgctcttacacacccatgctggcctccaagaacaacttgctgtcattcaggagcttgcaaactcattgctttaattaattaacggaggctctttggaagttagggtcatttgtttttaattttcagttaaaggcacctatggatttctattttaagaatagacactgtctactttacttgcttattatactttgatactaaaatacagctataatggttctgcagcattgccagttatttaagtattcctgagtatttaggtaaaggctggatggcttggaactactctaacatggcaaaatatgtcatcaatgttttgctccaagagtatcctgtaatgtatatgctcaacttgagaaacaaaatatattataattttaggtttcaaagcataaatccttaacatatttactggttactacatgctgggcacagtgccaggctcttaagtgactgcagtagactgtagacagatcagacttcttgttctcatgaagcttggaatctagtgggatgctcattcattgacctatgaatacgtactgtgttatgtgccagacactgtgatagatcctgtgctttgccccacaggtcaaggcactaatatagtattatgtttggtacatagttggcccataactcacagtaaaattaacctttccattctctttaacatattacattattacatattaaggaagaatgtgaaaaaatgtaatcataatatcagagattgctttttgctcacaaaaatccacattttctcctgcttttggggtaccaagctagacttcatttcattctcctttgcagttaggagaggtcacatgagtgtgtcacactcgtgaaagatatggccacatgtgtgtattttagccaatgaaatgttcgtggaagggatgcgtggcagttcatgaccaaggcttttgagaaatggctgtgcctcttccacattctttccctttccactggcctgatgcaaatgagaggactcaataggagaaggcagagccacaaaaattacacctggaggaaattgcctgtattggccttttgagtaagaaagatgtaaacttctattgtgttgggccactgaaattttgggacttatttgttacagcagcttgtataatccttgttaatgcagtaacaggatagttataagatggctcattataaaaattatgacagattatcaaggcatattccaaaaaatattatcatttggcaatgataatacatgtcattcagaagctgaagtttctcattgtcaccttgcgggggtatattgacaaagattattattgccattcaaaatatgaacactggatctcacataagtcatgtgacctgccaaaatttgcaaacctgaactacagaggagctagtaccagcatctaggtattctgtttcttagttctatccacccaccccattatactacctccatgatatttatgtctaaaattattatagttgtttgtttctaaattttgtctgcttgctttccttgcctgtcttccaccagcagattatagtgtctgtgacctaagactttgctatgtgccaggcaatagccttgcatatcctcacacagggatacactgccgtatccctagctaccaggatattgcccagcacatcgtagactctcagtaaatagttgtgtcatgtaagaaagcatgagtccatgaccagaaaataacttttcaagtcaggcattttgtaatgcaaattaaacatgggtcttatgcatttttgtgaaagaaggagggaaggaaggaataaaagaaggatgcattatatatgtggaatatatgctcttgagggggttggaagaagaggaaggcagaggatgaaggcattgaggtggggagggacaaataatttcccattcttaactaattttttaaacaactgattgctgtttgcagaagatgcgttggcctaaaatgatcataatcttttgttagcttataatgcttaaataggtcacttaaataggactcttctaatagaagagaagcccattatacagattaataaaaattgatagagacttgaaaactgctcatggggtcagttatctccaattaaaagttcatatgccaagaaaaacaagcctcttcctcctaaattattactgtgaaaattttcaagcctacagaaaagttggaaaaatagtacattaaacatacatatattctctacctcagttcactgttaatattgggccatatttgccatttccctatatctctgagtctgcctgtgtattatatataccattttattttattctattttattttatctttcagatgaagtttcattcttgtcgcccaggctggagtgcagtggtgcgttctcggctcactgcaacctccgcctccccggctcaagcgattctcctgtctcagcctcccaagtagctggaaatacaggcatgtgccaccatgcccagctaattttgtatttttagtaaagatggagtttcttcatgttggccaggttggtctcaaattcctgacctcaggtgatccacctgccttggcctcccaaagtgctcggattacaggcatgagtcactgcacctggcatatagataccattttaaatgagacatttaaataaattacagacaccatcacacttcatccctcaatacttcggcatgggtctcctatacgtaagggcattttcctgtgaaacaataataccattatcatacctaagaaaattaatgttaagtcaccattgttacctaatatgtgcagtccatagtaacatttccccaattttcccaatggtgtctcttgtaactctttttgttttaatccagtatttaatcaaagtttatactttgcatttgatggttaaggcttttaagtcttttccaatctagggtgatggttctcaagggtgggccccagaccggcagtgtcacatcactggggtctccgggggtcgatccagcaatctttgttgaaagaagctctccaggtgattctgatgaaactgaagagcgattgatctagagcatgttcccacctttcctacttttcatgacatttcatttttatcaaaagcccaggtcaatttcattttagaatgtcccacattctgaatttttctgaacattccctcatggtttgattcaagtttaacattttggcaagcataggtgatattggcatatttactgcatcatgttatgaggcacgtgttatttaatgatcccttttccccttcttagtgatgctaagattgatcatttggctaacgtggttaccgccagatggatcccctctaaaggctatgttcccctttataattaataagtgacctaaagactgtgtgaatattttcttccccaataaactttcacccaatagttgtaacagccattgataatacttgcctgaattactatgttggtgcatggtaatttttctaattttgtcactccttctatattaattagctgtcattctttaaataagagctttctttcttcccttgcatctatttgtatttatatttgcttaaatattatgatggactcatacttattaaaaaatcaaatgtatcaaataattactatcatcattatttccgatattcaaatagtgccaaatttgttcacgagagagcttcttcaaacttctttctgtgctctttccctgctttctggcacaacaaaatgttctaggcttactgtgtacattccctgccccacaacatgaatcagccatttcttccagtagcccttgttattttggaaaccagtatgtggatgctagatgccctacacacgtgcatgacttgagcacatgtgtgcacacacacagtcatatgtgtatattttaatcataatttcttacagatccctccaattcaaatttgcagagctattgtcaccttcttcttatgcttatcctttctctctgtaggtcagaagtctgaccttggtcttcattgagctaaaattcaggtgccaatggggttgtacttctttctggaggcccaaaggaaaattttgttttcttgccttttccagcttctaaaggccatacatattccttgctcctggccccttcctccattttcagagccagtgacactgcaccgctctgacggcttttccatcgtcacatctgcctctctgatgacagtcttaaaagcttcttttttttaaaggagtgatgtgattagattgagcccacccagatagtccaggataatacccccatctgcaaagcctctcttgccatgtcacataacgtattcacaggttccagggattcaagtgtggacatcttgagttattctgcctacctacctcatcttccctcattcttagttttatttctcttctctctgaaaatcctgacttttaacaacctcagtatatttacacattttctctgttctacaatatacacaaaataatttgagaaggataatagcaataacaccaacaacaataagcctactaagttaaagctcaagatttctttgtagttttctgttacttagaatatattcaggcatgtagttgaagtactgtgttccaaaattactttaattaatttctttgtatagttgtactatagatttaatatacaattaggttcatttttttctgtttgtattcagacttagggttcacattttccatcctttccaatttattttatattttgagtgtgtaaactatatgatgataaagagacatattcagagaagtccctgtcccatccatatcccctttaccctatttctacccaccagctacacattgtcattcttagtctctggtttatccttcccacattctttttggaaagcatagatggacatgtgtatatgggtttttttttaaccttgtttttacttctttcttaccaaaaagtagctgagtttattgattttatttttgcttgttgcatttttacttaacaggatatcttgcatatatatgtatatatatatgtatatacatatttatatagttatatatgtatatatatatgtatatacatatttatatacagttatatatatgtatatatatatacacacacacacacacacatatacagtatatcctgggaatcactctatattaggtagtcatggaaatcttgaaaggagtaattattaaattcttaaatacgtcttctggattgtttaacttgttacaactctgtataatatttgtgacttaacacaactataaaaaggcaggcattgaaagaaaatgtcttgtatgccttctgcccacctcttccctccctgaggcagagctaatttttttcctgtgtttgcataacattttgtatattaaagtattatagcaacttttattatagttatttttatttgacaaaccatctccctttctggcctgctagttccacaaatgtacaaagaatttctctctttccttttcttttttctttctttttagaggtgggagtgagtagcaatgattatgcctggcatatggtgtttctccatttacttattttgcctgaaattccattagagatttagtcagttggtctatttttataatagcgtctattttaaaaaaggtataacatcctaatatgtattaacttatcagagactagccacttcttagaaaagctatgaaaggtcagatgagaaaaaaggacagtggtgtttggattctgtctctgatagaaaccccaaggaaggcaaggaagagtacaagggttgtagatactctaggaagaagagaggatgaatcaaggaaaggaaaagaggagacagaaagagaaggtctgtatcatgatgtccactatgtgaggtactcacagcacaggaaatctgcctagatgataataggagtgatgttcattaggaaagaaatagccccaaggagttttttctttacatgctaagaagctgaggcccagagagatggaacaggtttcccagggcaatagcactaggaactggagctgcaaacttttgagtccaccatatccaccctgagttgaggtgatctttcttatgatcctgagagggaacctttgaaatcaagcaggcacccctacttccccaggggtgggcagagggcctgagcaatccctccttttagagcactttgcagctgggccactcatctcaagattggaatgtgccatctccatctttcctgacctccttcagtcaagtcagctgtatttgtggaggtgcattgttcagtctcagagcattgtttaaatttaaaatcaatagagaaaagtgtgccagcgagaggcacagactgattaagtgctgtctatatgaagaggtttatcctctgccacatttctgttgaaagcctgtgaaacatgaataggatggagcaaagtgaaaacacattaaaaattatgtcagatacccaaatgcagtaaagcaactgcatctctgacaggtaatcaagaattgggtgactctgagttctgatttggcgtaatgatatcaacatgttcacacacacacacacacacacattccttgtatacacataacacacatacaagatacacacacgaagtagacacacaacatgtagtatgtgtattgtataacacaacttacataaagacacacagaagacacacacaacacacatacaaacacctacatgcccatattcaacacacatgcacgcaaaacatgcaacacacattagtgcctgcacacatgtgcacatgtgcacacattgagcaacacaataaagatgtaacttttccatctcccaattcattctacatttttattttgatgaaaagatagcagtagagggggaaatctcttcatcagaaaatacagtgaaaaaattcccaagacattgtcacgtattactggttatttttggtggtgaagagaattatttgaaaacaaagaagcctttcacaaagcctctaaaatacaaaagatttaataacatttacatctgtgtatcagccatgtctgtaatgcgagtcatgaataacacataaaccagagcacggaaagaacagaagtgctcacacatcatttaaaatccaacccaccccatcgtcggtggaatcaaatacacagcaggggcagttccagttgctacacacacaatagagtcattggaaatgaaaacatattaattatgttccttaaggttaggagagaaatagcaggattcactaaacctttctaacttctctgttgaaaatttgtaccaaagagtacatcctgggttgcctctttatttttcctaagaaactgcagaatgagcatgtgtatttgttttgttttactgtttattcgagtctgcacttggggctcagacttgcctcattgttgtactgaaaatggaagaaagttggcttgggaagatggatctttgttacgagtgaataacttgcagaaaaattacttgttttaaatgcttgacaatacctgcacaagtcccagtggtatatgtggaaattcttgctgctatgaaatgagtcatatagtatccagtcctagcacccatggagcaacatgtttgaccatgaaggaaatcattccttagtctgatttggataactgtccgtggcccaaatttggaattgtatgttcctaggtccattcatttggctcctatgtatatccagggtatccagggatcttctaggctggtgagagatcatcaaactctgctaggaggcaacctctagtgccctaatagagaagggtgaagccgggaatgctggctcacgcctgtaatccaagcactttgggaggccgagttgggtgggttacttgaggtcaggaggtcgagtccagcctagccaacatgccaaaacctcatctctactaaaaataccaaaattagccaggcatgggggcacatgcctgtgatcccagctacttgggaggccaaggcaggagaatcacttgaacccaggaagtggaggctgcagtgagcccagatcgccccaccgctccagccagggcgacaggatgagattccatcttaaaaaagagaaggataagttcagggaaaattgaactgatgatttttgggtgagttcatatttattctttaagtcagtattgtgtttttgtttccaggggtaagaagatgttcacataatgctaatgttagattagcacattttgtttgcaggcttttgttttggcatttatttctccttcttcctctgctcactatttccccttctactgctaggcttccttctgatggtgtcagaacacggcatgccagtccagagtagtttaaaacgagctctgtaaatgtcatggaacccctgcctctgcctcccctatgtgtctcatttcagtgtaaaatttcaagcacttccctgtccttacgccgcaaaaggttaatagtcatcttttttttatgtactgtaaatgctcaattcctaaggatagtgtttcagggcaagttgagtgtaattgctaaataatatagtaattctctttttaaatgagtcatacttgcgttgttccagatgctcctgcatgcatgtgtgtgcatgtatacatgcatgcatgtaggtgtgtgcacgtgtgtgtgtgtgtgtgtgtgtgtgtaggcaggcatgagtgaggcctccccttgggggaagtcacagccatctcataggagtttgcacattttcacatttgggttttaaatgttgtgccacatcctgggcttttaggtgctgcggattatgtataatagatgacctgcatttacagagatgtgtgctatacagatgtaaatgttattatagcttttatattttatgttcttgttgaaagatcattttgtctttgaataatatggccgctcaattttttttggaggggagggggttatctttaaaagagaatatgaaatggatattgcacatcatatatttcttaaaagtaatttggaattttagggtctgggattggggctgactgatacactgccgtgatgagatataacccctggaaaataacagcacccgcacatgcctgcatctgtctaacctcataattcactttcacattggattatggatgtctgcgttcagtgagtctatcttccctttaggtattatttcagccctttgagataataaggaaagtttaattgcgttgttaattgattttttgcacaacattattaccttgattgattgcagagttgatgaaaatgttagacacaggcagcgtggagtatcagccaggcaaggagtgggagccttgtggagaatagataaccttgatgttaagagctatatccttcagatatgtcttcccttgacatattgatggcccctgaaaagggaaaagctgattgtatgcagaatgcaatcattaaacccacttcagctcactgttgattaatttgttttttcctgaaggatctagttatagggaaggcctcacttgtaccaaccacagccattttccaggttccagactgtgcttaaccctctaggtgaagggaagtgaggaggctggcttgcctgagacgggaagattatcttagggtgcgcagggtgtgtgcttaaggctcacaaggtgtctccatgctcgggaacactctatgtccttcaccatagtgctgattttccttaaattattgattctttaaaatgccaatagcaaggaacccttcactgagacctggtgtaggatgaaactgtcacttggagattctcaggaaggtgttcaccagtccagtggtgtcgggagagacatggcactcaggagcttttattatacattaggtaaaaccctgcatgagattgcccccatgattggagaatttagttgttattggggtgtgcctgtgtgtgtgtgtgtgtgtgtgtgtgtgtgtgtgtgtgtgtgtgtagagagtgatgataagaagggatttctgcagacagtttcttatattgtcaattactcctctccctggccttatatgacactttcttagaaaagtttattgaaagccatcatcattttttctgagtccagggccatcttcatggtagcaaaaatcaggttgattgatcagttggtttactgattgattaataggacttctgtcctgtttccctcccctcaactcacaccacttcattcgcaactgcccaaccctgcacagagactcagtgggctgaatttatgggcaaagaagttgcccctctggaagaatgcaagctcttatacatgcagtactcctagagagcctcatcttctagggagaacggattgctacttctgccaccccctcgccagcttccatgcttattactcatggaacattctggcttattttgccctcttctttcctttgtggctgtgcccaatgttcattcaaataaaatttcaattgtatagcattgctggaggcctaccaatagttacatcagcttcctggagtcctgagccccccccaggagaggtcatgtgggcttctccctgcaccacagagcaccctgtagacggaattctctgtgtgatgctaagcacagtttctcctcaggctgccccaccgcctgcattatgagtctttcttctcctgaactcaccactggtgctcagggagtctaatatccatagagtcttggccctcaattaccgtaatggcttataatgagattttggccaagtagcaggtagcaggttattacttcctgctcagcgtgggcaatgtctacgctgttaatttgtgttgccgaatgtggcttagagctgggcatcaaactgtcggagccagatgtattctattaggtgcgaggctcacattggcccatgggcaattttttccccccaatatggaagcatgttaacttaccacagggtgaatcctgacaaattcaagccagccaaataaaaggggtaatatcccaagccatcaaagtagtacattctagggacagataacacctggtaccacccactgtcagcagtgtctgtctgactggggcattctattgataggcaaaaaacacacccatcttaatattgctggagaggctctggtgccttcattaagttttaatgagcctgaccctaatgaaagcccttataacatgctcttctactattttccttgtctttatcttgggtagaaaaaaatgtacagaggttcatataactcttataacctgctttctactattaattcttccttaacctacagtttcttgcattaacatatacatacacatatacatttacatatatacatgcacacacacacacacacacacacacacacacacacacacacacagctttttcccaaagcaggttagaggatgggaagttgaagatcaggaaattatgaacatattttaccatttggcactgggatgagctagtgtccaagaattatgctgtgctttctgcaacaacagactgggtcattttttgtaaagcaaacttctttcggttagattatatatcatcagattccctttgttttcttttcagagaaagcaatttagggtgtgctggaattaggaaagattatggtgatatcagtacaggaagagtttgtttggattctaatgaagagcaggtggaggctggaccaatgggcccaagtaaggaaggccttttccccaatccttgcagggtttgaattatgacaaacccagttgttacagggtctgcttaattttatttgaaaggtttctttttttttgttttttattttgtttttttttttttgtagcttgaagaattaggaaaacaagaaagcaaattgtctttattttcagtgactctcttgagaaatttcagcctgcagaaccagacagaactgtggatgttccctgcttttgatgtaagctctctaataggaacagatctgaagcccaaaagcaaatttctgcttgagagcaaagccaaaattcccattcagactctgcaggaggacccccactgctcagatttcttcatacaagattctgtcagttttggggaagtccaaagtctttctgtgaaatttttcctgcaagttattttttgattatactccataaatgatggttcagatctattctacatatccaaagaaactgttttcttcttttttcctgttaatgtaattgcacattactaaaatttgaatgtttatggtttttgttttagataaagagctggaacaaccttttattattattattattattattattattattattgttattatttaggtatcattagctttcagactgctattggggataaaataaaacctccatttaccaaaactcaagacactagaaccctcagttaaccagatttttggatctctgattttagacagtcttgattttacaagagtaaaaagcaatgtcacgagttttactttttaaaaagaaataagggcccctctgtaggttgtcctaaaacagtgtttcttaaagttggtccctcagcatcggcatcacctgggaacttgcaaaaatgcatactcttggccccaactcagatccatggaatcagaaactctggggaacggggcttggcaagctgtgttttaacaggccttctcagtgattctgatgcatgggcaagtcatagaaccactgtcccagggccaacccatacatttctacctataactgtccagggatgtataataaatgctggggttcagaataagtatgctgagatcttttcatctattccacaatttaaaaacaatgtactgcatacctactgtgcccttggctttatgatgcatgggcgaaagtctattgttttcgattttttggagctcatatgagcaggagatcctaagatcttgagaaatgttcaatctgcagtcttcccaccccagctaatctcctaactgtactatcctcactaaaggcactccagaaatactcagttgtggtcactatgattacctagtaagacagtgaaactgactttgcttttagtgtcttatgtgtgaaaattcaaaaaggtttctagctaaccatgagttaatgagataatttaattaacaaggacccaacattctccgagtggctagttagtcacatgactgttatattaggaaagctaagaagatgtgtgagggccattttatacttgcctcactgaccacttgagaggcctctcggctgaaatggagaataacacctggacccagctctggtttcccctgcctagaaggccagtaactccaatttgtgtttactccttccctgattgaatccactcatgtatttttatcctataaaattctaatttaaaatgccattccctagaatgttatacctttattgctgtttgtttgtttgtttgttttttaataatgatatgtttgaaatatctagaagcccacaaatacctctttctcctaaagggaggtgatcatctgttgttccaggtatgaaaatagttacttgacccatgtaccagagaccaatgatggggatcagatgaggatcaaacagcagctggaattattgtcatatttttatctgagtagcttctgcctctcttttttgatgacactgagaccaggtaccctgagagggaagacaatgctaggtagatttgtggggagggggagcattaaaagaggataactttgtgtgtattgatccatttttcatttttatttatttttacgttttttacttttttgactgtcaaatgatggcatatctttttgaactttcatggtaaaaatgatgttttccacctaagaaatgcaggaaatctttagtattttgaatgcttctttacatttgtggaggtgatatgcaaaaatccccaatctctgagcctggaagattaattagaacaattgatggtaaagaaattcagtccctgaaattgaggcaagaagaaccccaaaatggggggcaaggagtgtctgatagccccattcctgaaaaccttcagcacagattgaccaaacatgacatactgatcattaaggaacctataattggtgaccaaaagcacagtgtggctataatggctctccctgaatagttgccgccatttatttatttatttatttattttaagcaagcggctgctttcctaacttcatgctgccctctagtggtgatgctcccgacttcagctagaaggtggaaaggatgaatgtagagataatggcgggaatggaggaggtggtgacggggtggctttttcctttctttcttttttctctcctgtctgaaagatgtctgagtttctcactcaaacattgagaaagaaacgtgaggccagagcacttgaccactgtccgctttgactgacagcctggttgatgtgacatccatcacggacccgcactgaagggcacttcacaaatctgaagggattcgcatcccatctcggcatgcactttggaatccagcccatctcaaatccattaagccctacctagaatacagacataggagagaagggaaatacactcacaccaaactagtcttgcagttcaagtttctctctaagaaaaagcaagtaagaatgagcctgctaagtaagggtgtgggtgatctttgatgttctccggagacccctggttcctgtgaacaggactgaacaaataaataatgaatttgaaaagtaagcggaaaagcaaaatttatattcctgtcgccaaggcagtatcttataattcagggatatttctgggctagatagagttgtatgggtgcctggtccggttctgtcactttccaaaagccagttggaaccttatttttctccgctgtaaaatgaaagaatttacctaaaatgaggttctttaaattctttctcagcttgagaatcctccaatacagttaaagaaatacttacaaagaaaagtttaccattctgtattgaagcatactaggcagtacagcaaatcacagagaatccttataggacagtataagcaattcattgtttaggaagtcaagaataaaaactgtttcaggcttcatctttggcttggaccaaaaaaaaaaaaaaaaatgtaacctgaggctaaaaaacaaaatttggactgctaagaagatttagcagtttatttgggggctggggaggagaggggttgttggagtaaggaaatatttaccatggagtttgacctctcatatttataatacatttctgtttgattgaaatacaatgtgtatagaggtaggagccaaaaaagggagctcccaataaagggggctagtgagcccaccctccaatctgagaatctttctgtcagttggtactcacttgttactacccccaatccaaaaaaataggaaattaaaaggcattgacatctaagcaaaagtacattgtctgtttcctttccaggattcacataatggaaatattccctgccagataatgtttaatctgttagcctaatatttctttcatgtggaaaggactgaatggcccactcagtctggatagagccacaacgcctgtaacctgagtgtggggtccaggacccaagatgggagagtagagaatgtcactaaggatctgctcaaagatgcagtaatttctcagacttggaccagcttttccattttccactgacagattatatgacagactatatgaggaacttgccctgcatttttttctcctctctttccttccccacctccccttcttcttctaagatgacaagcctcatttcagctgccctgggagcccagggtatgttttcttgaggctctggtttgtcacacgacaatgagcctgcccactctgtgactacctgtgtagcctccctggtctgggaggctagccccacagccttgcctgctgatcaccttcacgacaaattttgccagtatcccttccctgctgactgacttccttcccctgtttttccttccctacaaacaagtgggtgagacttgacaaggcccagcatttgtctgagcaggctgtataatctgtcctctcccagtggaaagctgcactggacgggtctgagcattggagtcaaatgccctcttgtcaaaaggataggttgcctggcatttttgctagctttctttccaggtatggtgcatcctaacccttgaattggtgctccacactctaatattttgtctggcatttggtagaagacagcatatcagaaccccacagtttagaccctatcatgcacttggtattcacctttgtccttcatactctttgtgctaagaaatgaataaaaactagtgtttactctactttatgataacaatgttggtagaaataatcaacctgggaaaaaaaggacagcaactaatcctgcacgtaatataatttatgatgaatgaaaaactgaccaaagatttatatcttgttgatatattgaaaaccacacaaatacatggggaggaattaaccttggtagaaataatgaaaacaaaataaaattgaaatgagctaaaactacacacaataaaatttgttgactaaagtttaagagcagactcaagtcttcttgtcgcaatttagatctgcaatattttactcaagaaaatgggactttgtaaaaataaatgactctaaaagagatttagaagatgtaatcagcacaatttaatatttggccagagctgattgaggaatttaaccttactgtaaaaattacgtgataaagaattgatcccattgaaaataaactcaataaaatagaaatgaaaatgttaaaaatagaaatggttttttgtatttaaaaattgattaaggaattaaattggctaaatggagtttgctgtgaataattaatgctttctcaaagacaaattaccagactagtttacatgtttgtatttataaacctgaagtcaaagcattcctggactcaaatttggagaattcaaatgtctaccaatgcaagacatcagggtcagtgtagcagggtaggaataccccttgtggtgttgtttttgtacagtgaaggtgaaacaggaagcatggtttgaagtggtcactgcggtatttagcaaggacagtgtgcagtatccccgcccccaaccccccacccccggcccccatggtgcaagagccctaacagaggttttgggggttatagcatgcactgttgcgatgcagtaccccattcccacccaatatgcagatgataaaccgagacacttgcctgaagtcctgctcagctaggttgggaaacaagtctcacactttttttttccttctccaccctcccctgggtaaggtgtagagcctttcttcatttcatctccaacctaaggcatctcagatgtgcggcagatgaagggaaaatatactgggtggagaagaaggtctttgtcctccttcctcaaaaactgcttccacacaatcccttcccctaagaccttttaaagtctctcttctttattctgtcttagtatttaagtagcttacactgaagtaggatgttgtgctaggagcctgtcatttctcaggctccactaaatcctgtgtgatagccacagcagagctgatagcacatcacatgggctgacctcagggtattgctccagctacttctcaagatcataaaacatgggtgtttattcctttccagttccccatgtattcacggcctgcacttaacaaagactgaggaatgtgctttctggggaatgtcccttcccactgtatgatgtttacagctctttaggccagatgataatgttcactgcacttctctcttttcaactagatgttgtgattgctttgtttttgtgggaggaaagtgtttggggtaaaaacaccaccacgatttaggaactgtggctgttgcctcctattactctttgttgttcaatggggcaaatatttaatccgtatatattttcagagtgtttcaaatgtctgaagtcataccagaggttaaaagatgagtgtccagcaattgacattccttactttgtggattctgtgtaaattttatgtacatgattattttaatggtattaatttatttaacaaatatttattgaacatctcatctgtaccaagtgcagatgctctccaacttacgaaggttcaacctataattgtttaaccttacaaagccgtacacatttgatagaagatgtaaccccattgtaagttgaagggcttacaacttcagatagtttcaagtaatgatgcatttttgatttacaataatttcaacttacaataggtttattgggatgtagctccatggtaaacaagatgcttctgtatggttttaggtaccgggtgttagaaattggggaggagggagaatattataggggatgacacatttatggacatgtatagagtcccatggaaacattgttctagagccttctgcagtggaccaagacgctcctgatcaccttttcctctctgtcactgggcccatctacctcttcacaacattgttatcaccttttgcaggggtcaggaggtacctagttccttcgtttctcatacagatgagagaacaggagttctgtgggggaacccttcatcccctgcctccatcctaggggtaattataaactcctagtatcacaatgggatcaagatatgtttgtgatttcatagctacatttataaactcatatgaaatgcatttaaaataatgatccctaaagtgatgactaccaaaactaacaatagtgataattattctattttacaaatataaatgtgttggtccaacctgcactccaatgtcaaatgcatttttgtatttttatatgcagattgtttttcaccactaaaatattaatgacagaccacttgctttgatggctgggctttagttctgttgaatacggagttatgagacttgggcttatgccaaagccagtgggatacagcttagttagtggtcagcacttctagctgtatgaaatgcagattgcaggaaagttaatgaaaaccctttcctcaaggattttggggtcccccagaggcccccttctatccaggttatactgtggggttacaggctggatgggtttcaagggctgacttagtccaaatcaatttttttattgactgacctgttgaatttgtctcctgcatcaggcaatattggacctggtgttctcatcttcataaggaaaacattggaaaatgccaaatcacctatttcagagctaaaatgaacctctgagattatctggccccttgcccttgttttacaaatggggaaacctgcccagtgagagaaagggatgtgtacatggtcacatgactgttggggcagggctggatctaaatgcaggtcttcccccacttccccttactaaatagactattgaactgcagctggaagtgtgaggccatccaggaatcagggagtccaggatgctggatgaatggatgtgcaagaattcccttccctggactgggctctcagggcctcccccagcaaaatctctggtactgaccctgcagtcccagcctcacatccaagaaaggaggctgattcccacccacttaggcagccccaaggttataacttaacctgcataattaggatgtccattccagaggggaaaaacatggaaaagataaagggcctctttaaaacagattcttcctgatacttttttttcataattatagctttaacagcttatggtgatgggaaagctggctacttaagaaaaattaggagtctcatttggcaggagagaattccccaggggatgttgccctgtcatttttcagggtctttcgaaaagaaaccccacacagacagctgcacgtcagcctgacacagggcaagcctgctttacttactatggccaaagccagatcttttaattaaaaacactgcatatgccattaaatgtgttgttccccctccagtcccaagaagttgtagtttgaagagatagaaacaaatgaatccgttgcagatgtgtagagaaaccattgcctactgagtcacaaaccagcgggttcccaaattccagcctcggagtgcctccccatcaaaatgttctttgcaagcaaactgttccctccgtaattttcacagttgatggcagttgccatggcgggagaagaagggctgtggggaggacgagggagagagaaacacaatgccacctcacttaatttacgagcagagcctcatattttacaaataaccttcatgataaataaaggcctgtggccacacatgggactgtgctgtttcgtgcatgtttgcttttcctggttaattttatttatttatttttgaacacaaaagtcacatattgggggtaatcacatcccaactctgagctctgggaggagactcacagaggcaattctcgcttaatttcagctgctggagatggtttgagtttgacaatttcagccgattcttagcattgctagccagagcacctttctccccgggcgagcaccagcagctggatctcattttcaactgccaggccgtccccacgccttcctggagcagcccacagactgagtgccgtcctttctgggagtttattcaaggtgacagctcctcacacaatggccttctgatcacctcaagtagccaagatatcagtggggtcgggcgtgctcctcctgcaaattccaaatttagattgactgaggttatccttaggccccttgaccccaccactccagcagaacagaactgccaggacctttgcagccacagtgagttttgtaatgatgtctggggagagatgttctgcaggggcaggcagagacgaccccaagtgatggggagtgatgtcagctttcgttagagccgcaggcagcgttagaatatccttggcataatatggcgctggtatctctgtcagtatctctgttttctgtcaccgcacacaatcctgggcctgtctgcaaccctgatggtgtcttttcagatcaggctgttgccagcacagagactagctcggctcttcaccacacagcccctttgtttgaagtctgcccttttgtcgttaatgcacttgatgtctatttaaatctgacagtgaatgcagtatctgttttcctgtcaagagatcattgacaatattaatacctcatgtccttgcctcattttccaagtgctgacacctagccgcagtctcctgcattcatcaaacagccttctctcaccaggatgtctataaacattcttgcttccaggcccaaagaaacagggtaggccttaaaaaggacttttatcaatgccagccagaaagaaggctcgggaatgtggcacagaacacatcccagcccacgttccaggagcatccagcctgtttctagggcggcacttgccattcaagttgcatgtaagtgagatctggagtcgaagtttaccctggagaaagggaagaaaaaaaaagcagttgaatccgtgaatgtactggagagtttactggagagagggcactcatggtgggtggtgtgtgtgtgtgtgtgtgtgtgtgtggtgtgtgtgtgtgtttgcctttcatccttttgcttaagagaaagattgtgttctttatgacatccgacagacctatctgttcctttttattaaaattcatgttatcctagtgccatagaaataaattagcatcctttggccccatgcttccacattcttcagggtttatttgaatcaattatgtttaaggaagccctctgtggatacctggcagaactgaggcactcccacccaggcctgtagtggatgctattcctggagcagagcctgatcagccaagcccacagaccagcaggatcctggcatgggtgacaatattagtacaatgctgatggctacataattcagcacgataaaggaaacagctcaatgccaacaactaaaagaataatttaggtcccaagaagggtctcagtgaggttccatccaagctcaaagtttccaggcaccagaccaatactgaaaaccagaaattggggattaggggccaaggagaaagcatgaccaaggaggaggaatgagccacagtaaacttactcatgggaacatggcaggaagtaaaactaatgagagtgagcccaaggccagctttgaggccgtggaacaatgtcaccctctctccattgccaactctgatagactatttgaccccagcaatttctagctttgttccaagccatccaaaccagggagcatctgctctgtccttaaaagtttctaaaagtcattttgatccttatgtaagaataaggtttgaagttttgtagtggagaaacatctcttttacagttgcaaaaatatttactacttagaacttctgatgtgaagaacctggttaatttcaagtgctaatttatcacaaattaaccaaaaaaaaaaaaaaaaaaaaaatgggcttgttggtttcacactatcacactgatggaaaaaaaaatcatcatgtccctaggtagctattttcacaggcagatttgtggctattgaatgactgtcttatggacatttcctttctttgtttttttctagttgtgtacagttcagagactcaagtccgattagcgctaagacaactctgtccaactgaatttaaaataggtttttctaaaaatagaagaaaataaaaatgcaggtggcaaaaacaaaacagatttttccttgataatcctacagagctttcataataactatggaagtgatttcttatgggcatttagaataaataatgagttgattaaaaagttcaaccctattgtaggggcatttttcattgttaagtctcctacaatctccttgaatgagaggagagccttatacggagccacagagttacttaaagtaaaactgaaaatggaaatcaaatgcattctgaccagagaaagagagttcaggattcctgtaagaagccatttaatgggaggctcttgttcctgtccatgtggtgtttttttttgtttttgtttttttgtttttttgagacggtgtctctccctgtcgcccaggctggagtgcactggcgcgatctcggctcactgcaagctccacctcccgggttcacgccattctcctgcctcagcctcccgagtagctgggactacaggcacctgccaccacgcccagctaatttttttaatatttttagtagagacggagtttcatcatgttagacaagatggtctcgatctcctgaccttgtgatccacctgcctcggcctcccaaagtgctgggattacaggcgtgagccaccacgcccggccattcatatggtattttgtcaacaccacctctcttccttaatcatcccatatgtgctcaatgcctggtgcctgccagaatttggaatattctctctggaagtcaacaacattgcttcatgataaagggtatcaaaatagtcacattctgggaagattgttctacatcttttacttgggctgggttcatctttaaactcttaattttccattctttgaaactctactaagggaaactggcgtgaggagaggctacattctggggagtaattggccaaattagaaaagtacctagcatgtggaagagaagtcatgcagaaagtgatattcctaggagcctatacttgtagtgacattttatttcaatgtcaactctgaggttgacagaatcttcttgtctgtgaggacaaaaagggagagttcttcccttctggagcttcatccactttctgctgcccattggatctatgattatcttgcatgtctgcttttcagcacctgtgtttccctgctatgctaagtgtgccacctgtaatgatgtgtgtctttttatttgcaggtgtcctggggaagtgtcgctacgtttactatgggaaaaactcagagggcaacaggtttatccgagatgaccagctctgaagccaacttctgtataccttcacccatttcatgaaaataaaatcaaaagggaaatcaaaaataaagaaaacgctaaagaaaaaacaatagcccacattgcctctctttgggaaaagctatgacttcagcttttggtaccttccgctgactttgccaggcctgtcaagatgatccttctgccttagactgagtggtcacatagagattgacatgattgcccttaagcaggtctcatccaccagggtgacagacagcggtggcaaagcaacagggctgacagcatgaacaccatgatagattgcctggtcctgccactgctcacaggggagcagaggtcacacctggggcctccctggacatgctcagtggctgcagtcaagtgagaaagactgtcctcagctcgcctattgaattgaaatccctctgataccatcgtgctgtgggcttatttttagtgaaatagtcacagtttaggggatggccattctccctcactccttttaaatcttaacgtcctgtattctgcatatacatagctcccgtctcttcccctccaccttcctttagcatcgattttatgacaggtggtgcatttcagtttgcagtttttcggagaacaaggtataacttcccagccaggtcatacatttatggctggcttcatgttgctacaatccctttattggcgtaaatagctttccctaaatccctgactacaaaagcgtggacttttatcttgtttcattcaactctaaatccacttcttgccctgaatatgatgcagtgtaaggcataaggcatctttctcagcatgagggtttggttgcaccagggactcttatttattaatttatttttaaccgtacacacttccagtgatgcctgtggccatacttgtgcgtggggctggcttgctcctttgggtgctatttaaagggagtgaggtgatgaaagatagagtgaagggtcaggaggttaaaaaacaaaattaagactgttgaaaacacccaccagaccaaagagtttttatagaaggcacaaaccttttggattttgcatctttgtcatgacctctcagaaatcaaatccacaggttgtgagacagtgctctgtcttcctgtatgcttggctgtgcactagcactaatgtcacaaggaacataagtgtgatcattgctagttgggtgactcaaagtttatctaacttgctggtgcaccagtcaaatcactctagaagatgttcaaaaggttgattgattgttcttgacacgatagtgtttatttttctgcttcttccatttagaccaagtgttcattgtcctcccagtattaggtcagtttgatgacagcaaaacctgaaagagaatccctccaagttatagatactgagggactaggagctgctattgtaaaactatggggactcagaatccctaagctgcccaaggagaacctactttctcagctctagcccgtttacatagcctctggcccactgagtcaacacaggccttgaatgacatgtattgaggctggcaggagtccctgtttgagattacacaacctttgttaatcagttct

SEQ ID NO: 343 - DNA, 238503 bp, Homo sapiens
  source 1..238503: mol_type = genomic DNA
ctacctgactacaaggctatagtaatcaaaatggcatgatattggtataaaaatagacacctagaccaacagaatggaatagagaacccagaaataaagccacatatttaagagccaattgatctttgacaaagctaacaagaacctacacgggggaaaggacatcctcttcaataaatggtgctgggaaaatcggtagctgcatgcagaagaaaaaaactggacccttttcaccatctacaaaaattaactgaaaatggattaaacacttaaaagtaagacccaaaattataaaaatcctagaaaaaaacctagggaaaactctcctggactttcttataggcaaataatttatgactaagaactcaaaagcacaggaaacagaaccaaaaatagacaaatgggattatgataaactaaaaagcttctgcacagcaaaggaaacaatcaacaaaatgaagagaccacctgttaaatggaagaaaatttttgcaaactattcacttgacaggggactcatatccagaatatatacaacaaactcaaacaactcctcgggatccttggaggaatctgggaaaggtatatttatttcagcggtgcctcagttccctgtgctgtgatgtgaatatgcacttccgtcttctcaaccttttcccatttctatgtacaggagtgtttactgcccttcctatcaccttcaaatgacagtaaagcaagaccaaactttttatcatctgctcttcagcctcattatagacaagatacgtgttaatcctttcaaaggcccagacacaatcttgttcacctctgtaacctcctccactaaaaaagaaagagcagccatttctatttagaatcgtcattttcaaccaaggctcttcgttaaatgacccaaggaactttttaaaacacacaaatggctgttccattttccctttacttcataaatgataatagtcatggcttccattgattgaaggtatattttatgctgggtgttgggttacactcccacactggggtctcacaaccgagccccctattttatagaggcagcagctgaggctcagagagattaacagtgggaagatggcccataccctatgcttaacggagctggctgggaaattgtcctcttgacaaatgactgttaggggaacgctagttattagagaaacaggaatatgcacctttcctccctgctctgccttagccatggacagcattcaaggactggctatactggtggttacctgcgactctgataacttctcatttctggagagttatttgtttcctataacttaccccagaatatcatggacacacaaaaaaatgaatgcagaggcttgattttcaatcaaattgctctggattcaattccaagaaggagtggtacagaattggtgtgactaagagcactcaaagcctcaagctttttacacagcaaaatacaactgattcatgactggggcttatgaagcacacagaaaacatctgataaaatacacatttattagaactttttcagcagcattatttccagttgtttatctaatcaaagtaattacagtcagcactcaaaatatcagcaacaaatattttgagaactctggaataaaataatcagtagtatatgtttcattcattcatccatccatccatccatccattcattcattgtttaacaaatgtgcaatattagcacagagagtcaggtatgctatttgctatgggaaagtgtatattcctgccatggttcctgttgtgcagactatacccactatttaagaggagagctggaagccaggcacagtggctcacgcccgtaaccccaaccactcaggaggctgaggtgggaggatcacttgagcccaggacttcaagatcagccttggcaatatagcaagactccatctctaaaaaaaaaaaaaaaaaaaaaaccaataagaattaaagaaaagatctggactgtacagtacattctaatataaatgtacacatttagccacagggcctaataaaaagcttaataagaatggtttccctttctattcaggttcaacttaggaaataaatagtgattataatgatattttcatagaaacaaaaacccagttgaggctttacttaactggtattttttttttttgcaccttattttatgaagacacagatttggtttcagaaattcagctactgagctccaactactagggcaggtgaccaccttgaatgtcaggtgaggggagaaattgctccagggtccatcagcagaagagctcatttaattaaccacaaactcaatgcaggacactggcacttaatgatatgggatttcctcatagacatcacaaataaaaatgttgtcttggcagctagtgagagaacacacatgaaacagagagttctggttagacaatgccaacacacagaagggccaaactgaattgcttttcctaccttctgtattatctgaggagtctacagtcaagtccagatgtctatacaacacatagtggcccctatcaacatagccattaatcaaattgacatgtaatattgaacattaattaagtgctaatgtgtaaaaatggacccaagagcggggcctggattcctttcctagataattttataggaaatatgagtggtgcctcttctttagacacggctaaaggtccccagtcaattccttttcttgttggatcatttactataatgatcaccaaccaaatcagcagacatctttattagcaaattcagtaacaggataatctttccaaaatttacaaatatacaatatatttatagtattaccttcagacaacttcagtgcaaagatatacatatagtacattgtgataattatttgtaaaaatatgagacggcataagtaaaaaaagacacacaggatacctccaactataggcaaacagggaaaaatatatttttttcataaagtactgaatgttaacttttttcatctgtttgtaaaaaatatatgtgcaaaagtgtgtttctaattattccctaaatagctggtatagctatacttcagagtcttctttaacaagatttgcggtgtctttaaaagtgtcttctgttgcagaataggttggagttgggtctcttctcgaaggaggcttaggcttagcagggagcgaaggtgatggaggtggtgtcgcagcaacactttccttttgctcgttctccatctaagaatacaatgtaacaggaatcagccatttattcccccaaggtcaccatacacggtttttcataaagaagactatttgtggccactctgctcagaataatctaagtgtgtgtccaatttaaccaagcaaataatttctaagaaaaaatgtctgtgctaagaaaaattgttaaaaattacctgtgcatagattggattttcaaagttggtagtttgtttagattttcgtttgaagagattccattttgtcacctaaatgaaaaggggaaaacaaaaacctctcagtaatggaattattttgtgggtttcttttcctcctgtctcagttttaaaatttcttcttactgaagggtaaagcaatttgggacctgggaccatgtgattcagcccatatggtaaattgttcaattcctcctatggtccctgaacagtaactgaaactctgggctcttttaatcgaatggttttaaacacttctttgacttcaaatttatatattatagaatttgtgccatagtatctacaagcaaatcacctggttacctcagtacagagagaacacataaaacagacatgcacaagatgcatctggagaaaaagagatttctggggctgcctgaaaattgggtggagatggcaaagccaaactgtaactcttattccctaaagtaacattctttggtcaactcaagagtatcccttctcccttcatcattccctcctgtgtcacaataataataacaaaaacatctaacatttattgagtgcttactatgtgtcaggaactattctaagagttttacaagtttctgattttttttaacaaaccccagaggtaggtacacttattatcctatacttgctgagtcacagcaagattatacaactaacttgcaggtagaagggcaggtaatgattactcaggggacccagaggcccataaactggagaacccaaagataatcaccctggaccatggtgcgtggcccacgctttactgaaaagttgcctgtcatgctgactgccagataaaaacctggtgggagacaagggaacagacagcctactctcaacaggagctgagggagcccacaggttttatggggtgtctcttactctgtgacagcaggggaccagcctgtggaggagtggggaacacagggctacagaagtagaagaggtcttcactttaacccacattcaagtgagaacctgctttgtacatagtgcccccaaggggaacatgaagacattcaggtcagagccctgcctctgggcgcttacagttaagtggggcgggccaaagtctcttagatgtcattgcttcaaaatgaaatggctaacttgaagttaagcaattactaacaagaggaaagggacggtgactttcatttttgtctccttgggggatcctatgcatatcaatgtaacttttggaaaatgatagaactgaatctttttttttttttttttgagatgaagtctcactctgtcgcctaggctggagtgcagtgtcacagtctcggcccactacaacctctgcctcccgggttcaagcaatcctcccacctcagcctcctgaatagctgggactacaggcatatgccaccacactcagctaatttttgcatttttagtagagatggggtttcactatgttggccaggttggtcttgaactcctgatgtcatgatccacccacctcggcctcccaaagagctgggattacaggtgtgagccaccgtgcccagcccatgtttttaattgttagtctttcaacatatttatggatgaaagatacatttgtgggactctggcatattcaaatcaacctaggtgatctcacccaagcgcctctactgcttttaaagcatgctggctgttaactcagtgcccaggagggaagaaatacagtgagatccctggacataacatggaagacacattttagagggtctcagcctcactaatgtaaaaaagtaagaggaggaaccaaggtattacaaaagggaagagaaagaaaggactacaattggtgaagatctgctctcctttgaaagagactgtcagtttacattttgtttctgataacagacatgcagatcagaggttacagcctccccaccacagtccccttcctgcaccagctggggaaaatgtctatttagtgaagaagatcactagactagagatggactgagaaaaaatgttgaaaatataaaataaatctggcactagcttggggttgactcaggcttggaggaccaaatatatgacattcaagcatccgtgtgtctgtggaaaattaatcttcaaaatccatttttaatatagcttaaagaaaaaatgtttagtcccttgaaaaatctgaaactgaaaattcctttctagacaatatttatgtatgtctgtgagtgtatgagtgtgtgtgtgtgtgtgtgtgtgtgtgtgtgtgtgacatgagaagaagaaataagggaatttgagaaggtgtacagaagccttgatatagactcttctcagcatcaatttaggtcaaattttattttgatttaaatcagcagaacagaaaccaatgtttaaggtgataatgagactgccaagttaccaagatatcaatgtttatagactatgaaatttgagaaataaagattgtataaaatggtaaaatttccaactactcttagactttcatttctttacattacttcacaaaattggtcatagaatcttagaacagagacattccagatcctagcggttctcaaccaggagtgagtgcacatgtgttggggaggggaggtgatttctggggtcacactgaattaggggagacactactggaatttagtggacagggaccagaaatactgaaattccctgagtgcataggacagttttgtagcacaaagaactgtcccactcaatatgccaatagcgcccccagtgagaaatattattgaggactctagccccagaagtaaaacagtttgtccagattcaaacagctatatctggtatagctgcaaatgcattcattaaaactaatgatatacattaatacagagtttaatatcaaatatatttattgaatttcttcctgcagaccaaatagtgtaccaattgcaaaggacctgcaggcatgtttaagaagctccatctagtggcatttttttctttcaatctccagtattaaacaccatccctgacacatcgaggggaataacgttagttagatgattggttggccaataatgaatagatggatgatgaatggaaaaattagtgccatctagtggtaaagatctgtaatagcaggagagcgaagaacagcttgaaagaataaagatgcatgctgtagagaaatcacggcacacacagacggatctttcatctgtatctttgacaccgtgaaatctttattcatactgagtcaatttctcaacttaaatgtctctggtctgaagatactggatccagaagtctatttgttcttctttgtgacatgtcctcctatgttacaaggaacattattcccaactcgatgttagaatgtagctttatttggtggaaagtttttcaatctatgactttttaaaaaattatatttattaactgtcaacacatcttgagatctttgagccttccagaatctcccttgtttgcttaaggttaataaaaacccagtcatcccaaagtttttccaaatcccacattatttcaggagtcggcaactgttacctgagttccatcagcagctggtgaagttgggtttgtctctggaactatctcagaagggtttatgggacttccataattcttattatccacattttcagatacagtcacctgtggacatgttaaaggcctttacccaattttgaaagaatttagtagtaaataaatttgctgtaaagtttgtaccaactctggctctttttgccatcttgttctcccacagacatcatcaggcaccatttttattgcatgacccagtaggccaggactaaacatcactcccaccgccccaaaatcaagagcagcaaccactaagtcacctcataccttaatcctgggaggcaaatacatccctcactggtcacactctcacttattactagcaatttctactgtattctctataccttcttactcccactgttgaccaaatttttggataatcatactctagttatatactggaagccaaatcctagaagaacagcaagaataattccccaacctcactgatgaactgagaatcctatctttggatcttaataatttctttgaatattaataaatcctatcttcggaaattaagatttcatagtactactaaaaagaggttgaatttttgaaaagatgagaatgatagaattaataatcttctacgcatttttctataacattcatacaattccaaggttcccttttaagaccaaattaccatgaatgcataataaactacaaggtagacaattcactccttttcctatattttcacattcattacttgtttattctgaaacttggatatgcatttgtatacatggcctcattttattttaagtgaagatgtcaaatgaaatgtcgtatctcttttatcatgtgattaaagttttcatatctgtttatcagaggatcagggaaaatgctttcaagatttaaacatttccgatcttaaaatcacaaaatatttgtaaaataaacatttctagtttctgtattaaaatgtgccatatctcgagttcaaaaggagcattaggtgttaacaatgacagttattcattgtcactaaggccatagttgttgtgacaaaggagatacatgttcgcagttgacaagcagtaaaagtggcgctggggctattgatgcagaccttatgtaaagttattcccttcacctatattcctatttcatctcccagctcttcttaaagatgacggactgaatctcaaacatgctttctttactattcctttgcacccgtcatcccagcctctcttcactttcacttagactgaacctgacacccatcaggctcagcaaattacctgggctgtactgctgcaaagcttcacagacagcccccattacttcagtcaagcccaaatttcatcctcatctgttacctatttcggcataattctcataaaaacacacatgctctccctgctgatcaagtctgactaatctcccaaacctcaatcccttctacaaaacaacaactcctttccttcctaggcatggttagtgcagtcagaattcttacacaagagccgggaccgtgccctgtagcctttctgtccaaacaacttgaccttactgttttagcctagccctcatgtctgcgtgcagcggctgccactgctttaatacttttagaggccctaaaaatcacaaactatgctcaactcactctctacagttctcataacttccaaaatctattttctttctcccacctgacgcatatactgtctgttccccagctccttcagctgtactcactctttgttgagtctcccacaattaccattgtttctggcccagacttcaatccagcctcccacattactacggataccacacctgacccccatgactgtatctctctgatccacctgacattcaccccatttccccatatttccttttttcctgttcctcaccctgaacacacttggtttactgatagcagttccaccaggcctaatcgccactcaccagcaaaggcaggctatgctatagtatcttccacatctatcattgaggctaccgctctgccccgctccactacctctcagcaagccgaactcattgccttaagtcaaaccctcactcttgcaaagggactacatgtcagtatttatactgactctatatatgccttccatatcctgcaccaccatgcaagaggtttcctcactacacaagggtcctctatcattaatgcgtctttaataaaaacgcttctcaaagccgctttacttccagaggaagctggagtcattcactgcaagggccatcaaaaaggcatcagatcccatcgctcaggacaatgcttatgctgataaattagctaaaaaagcagctagcgttccaacttctgtccctcacagtcagtttttctccttcacattagtcactcccacctagtcccccgctgaaacttccacctatcaatctcttcccacacaaggcaaatggttcttagaccaaggaaaatatctccttccagcctcacaggcccattctattctgtcatcatttcataacctcttccatgtaggttacaagccactagccagtctcttagaacctctcatttcctttccattgtggaaatctatcctcaaggaaatcacttctcagtgttccatctgctattctactactcctcaggaatttctcaggccccctcccttccctacacctcaagctcggggtttttcccccgcccaggactggcaaattgactttactcacatgccccaagtcaggaaactaaaatacctcttggtctgggtagacactttcacaggataggaagaggcctttcccacagggtctgagaagtccactgcggtcatttcttcccttctgtcagacataattcctcggtttggccttcccacctctatacagtccgacagtggaccggcctttacttgtcaagtcacccaagcagtttctcaggctcttggtattcagtggaaccttcataccccttacggtcctcaatcttcaagaaaggtagaatggactaatggtcttttaaaaacacacctcaccaagctcagccaccaacttaaaaaggactggacaatacttttaccacttgcccttctcagaattcaggcctgtcctcagaatgctacagggtacagccatttaagctcctgtatagacgctcctttttattaagccccagtctcattccagacaccagaccaacttggactgcaccccaaaaaacttgtcatccctactatcttctgtctagtcatactcctattcaccgttctcaactactcataaatgccctgctcttgtttataccaccggtttacactgtttctccaagccgtcacagctgatatctcgtggtgctatccccaaaccgccactcttaactccctcttaaagtaaataaataatctttgctggcagggctatgccgaacctccttgggcactctctaattagatgtcctgggtcctcccaattcttagtcctttaatacctgtttttctccttctcttattccatttactttttcaattcatacaaaaccgtatccaggccatcaccaataattctacacgacaaatgtttcttctaacaaccccacaatatcaccccttaccacaaaatcttccttcagcttaatctctcccactctaggttcccacaccgcccctaatcccacttgagcagccctgagaaacactgcgcattatctctccatgccacccccccaaaaatttttttctttgccccaacacttcaatactattttatgttatttttcttattaatataagaaggcaggaatgtcaggcctctgagcccaagccaagccatcgcatcccctgtgacctgcatgtatacacccagatggcctgaagtaactgaagaatcacaaaagaagtgaaaatggcctgttcctgccttaactgatgacattccaccacaaaagaagtgaaaatggccggtccttgccttaactgatgacattaccttgtgaaattccttttcctggctcatctggctcaaaaactcccccccactgagcaccttgtgacccccactcttgcccaccagagaacaacccccctttgactgtaattttcctttacctacccaaatcttataaaacggccccacccctatctcccttcgctgactctcttttcggactcagcccgcctgcacccaggtgaaataaatagccttgttgctcacacacacaaaaaaagatgactgagcaacaaggctgcaacaaggaaatttagatatctgcccatcaactctagagacctttgtacttttcagaaaagtatggcaacagcaagcataagaggtccctctccctttaatccacctcaaaccacatgcttgggatagcagcaagaaccagagagtgggccccgtccccaaattcctgtatagtgacctgacaattctccactcattcatttcacaagtatttgtagagaagctgtggtgcttcaggcactgtgtttcccaggcccctgaagggactcagacctctcttgctctgacaccactcaaaatgaaaggttcttggccagcagccccggcatggctgccaaacctccaccactgtgcaacagaacaggattctgattgttttcaggtcttatgtccttgggttggtcctgttcctgcagatagggcagctgcagcatggaccactcactatgcttccttccctttggagggaaggttaggaaaatcctaagacatgactcaatagattaagatccagcgacagcagtaactgaaagaaaagactgtatggtttctcacctggattggctgaaccactttgacagcactgtctctggctgagtacattgggttttcaaatattatgggctgcttccccatttccatgacaaagtcttcactctgatggcagagacagaaagagagagagagagagagagagaaacagagagagagattacaccatactaatctggttcacacacaaagaaaggtgccttcctcacacctggaggtacgctaggtgctacgtcataagttacccaaaagagaacttgcaaaaaaaaaaaaaaaaaaaggccagcaaaacacaagacctccatatggcaaattattatgcaaagtaacataacatgcactaatttaccaactcaaggaaatggtaacattcttcttatatccaaattctcttaaataactcacttgggaattgggtctgggccacagagaaaaggataatggtggaagaagaaaagaagaataaggagagaggggaaggaaaaagaatggataatataatattctcagggaaggaaaacaatgaaagatttgagggagagacaaaattctgaaagtggtttcccaatactgattacagaaagccccctcagtgccaagactgtggcagccccctcataaagtatttcatttggtcctcccaggaggtattattttacctgttttacaaatagggacaatgagggtcagagatatcaagctccatgtctattgtcacatacttagtaggtggcagagccgtggtctggaccaacgccaactctaaaatcactgtttatttcatcactatacattggcagaaaaatatatgacactaggaaaaatatagttccctactccttttatacatataaaagtcatcaaataaaaacaaaatatcatgtcctcctcacacaccaccctcaaaaaaaccagaaagctcttcaatattcaagttaaacttcagactgttcatgattccaattcaacagcgtggcttagagcaggggtaaattccaatgttattaccaatgtttttagacacctttcagcaacaaacctaatgtttcctaacttgtgtagtgcagaccttattctgagaggcctaatactgtatttcagtcttctctaggtgaattttgttctttataaaaagtatttattctataaatgacaaccttcaaataatcattttgaaaccatactcaccattgccattgacctgtcaatagcagtctcaggtccaaaaccagacactccaatatccatgttaagatctgcccctgatctgaaggtcaccccattcccattttcagagggcttgacgagactgcttaagctggaaagaagtaaccaaaacagtgtcttgttatttaaaacaacaacaacaaaaacaacaaatacaacctttcacaatagtaccctctcctccacattgccaaatcttcctcaaatgtaatgctcaattcccactctaaatttacactgtcaaatatggtagtaagttcccttagctacctggaaacgttaaagcacattcctgaaccatgagatctaaaagaaaaagagtccagcacatagaaggataaagcctgggccatcacacagctgccttttcactcctctctgacctgaacacctaccagtaggcacaaccatttggactacaaaacacagcttgtcactcaggctttagagaagcacttgactaagaagttgggatttgaagtgactgctttacatcctcactactttttgtttctgtggaatcggtgaactgcgtattgtgcttttttaacttagaaagaaaactaagtccttcacatggcttcatatgaatttcttaggcttcaaacatcaacgttccccataatgaaactgaccttggcagcttgggcagagcaggcaaaagggagccggtccttctatagtggaagaatcctgcaattgccagagctccaattacgacgatcaagaggattgtcaacagcacagctactgcggctatagaagaagatagcagagagcacatcaacacatgggagcccgcaatcctggcagaaactgggggctagaaccactccttcaaagactgggttaagtagaaaagctgtgacagcattcaatgtaggggccatgagtaatttccaagttgctcacattcttaaaacttacttgttcctggagagatgccttttgaaaacgccatttcacaatattttccggtgtagccgctaggacacctgaaaggaaaaagcaaatcattcactagctgttatgttcttaggcttctactgcatttttctgagcacatcctgaagtagagagagctttgactgcataaattacatgttgaacagacaatgtatcctgcatgacttttgttcattctgccaagagaagacaagcagaaagaacagtgctctgattttagaaatgcacttgtaatggagtagctgtggcactgagggggtgagtctggccacgaaaacctattggtgtctaatctatgcaatgcttccttagagagtacaaatggaaaccatggttatgtttctttcttttatatgctttcattaaatgctttttaaagacatccatttatcttgctccatgttagagttttcgcaacacagtcatcttctttccgaatccatcccagtctttctgctcatcacgagtgccttgtactaaagcagccctgcagacagctcttctcccacagccctgttgtaatcaacaataccaggtgagtaggaaaatgctgctgccaattctctaactccttgctccccaaagtgtggtccaagaccctgtggcctacctagagcttgttagaaatgcagaatctctgtgcgtgagaatgggcacttgaaccagatctccacgggattcttatgcacattctagttaaagaagcactgcctcagttctctgtagactccctcaagggaaggcaagctggttaaaatgtaagaattagtgaactggtgaggttcctgtatttgttttcctggctactttaaggtctcaaatttccccagaagaggcaaggcctatagctgggacctcaacattcagacttacttgcatttggggaggtcagtctcatcaaaatagcaatttcctccgtgcatgcacctgcatggggggggcaggttgataggcagttcgatggctgcaggaagggaaagccatgcaggtgttagtcagctgtactcagcagagtgcccacaccatgcaaaccggcccaggttaggggtgggaggaggggcaggccagccaattagtctccctgtcaaagcttaccttccccctaagtccagtgagtttccttaaggtcttggagagtaacatacatttagtggaaagaaagggggcagtttatagaatttttcccaaaaaacaatggagaggtactagactctggagcacatatattaatagttacaagaacctagtggtaaaataatctcttaaaatattcacattctcatttgaagttttcagaattctcctccgtgaacccagttaaaatcaagagtttaatgtaggcccaccttgaaacttcaactaaagacaccaaagcatcagtaattgatcagtccacaggcagtcacatagctacagatatagagatatttgataggcagttagctagagagctcctgagttttcaagtcctcccaaactgcccttactccaagtccctgctcccagctaggcctgtacatactcccaggatgtgcctgatggggaattagtgcttcagtgtcttttatattgaagatgcttaataagtataggttacatgtgtatattatttaaagagtctagataccctcctggctcagtccttcaatctgagtctccactcaatgttcactgtatcagacaggtcttccctgaacactatctaaaggacaatccccactcaccccatcctcatccctcttcctctgccttcattttctccatagtaccacctgaactaccatgtatttattgacttctctatttattgtcctcttagaatgtaaactcaatacacacagggggttttgtctgttttgttcacctctgttacctccagcacttagaacagtgcctggcacatagctggcactcaagaaatctcactggactaattgcttaattattataccaaaccgaggccctatatggaatgactgccatcattcgtgtgcttacttcggttaaagttctttaaaacaagaatcttaataaaatccacttggcaaaaagtttaaatgagaaaagtagtagatgaggtgacaaccaggaccacactgctcccacgatgtgaaattgcagtaagtggcaaaacaatctatccacagcatggaacaaatctcaaagcctgaaattgtcattttgttccaaatatggctcgaaatattggattcctaccaatatttccccagtagcgttgggatgagtgcaagagtaggggaagaggggtgacaagaaacagttttttctccctggattcattccctaaacctgccaactcctcagcctgtttggaatgagtcaaagggtggttcctggtctaactgcctgctccccctggtggtagaaggtggttaagcgttttcctttccccatcagctaaaactgggggaaggccccaaggatgtgagccataaaatgggccgctagtgaattgcaggacgactttttcacaggcttttccagcaccggatgctagttagggacactagttattcgcccccatccggcttattaactccttaaaagagtcattgaaaaaaagtcttgccaagaatagatcacccacagcgtttgggactagaattaaaccacagcttcctcatgctggtcttcgtctcctgataatataaagcacttttcaaaaggtagccctttttcagttgtcaaaactggacatggttctctaccctgaggagctacaattaaggttgagtggattctggggcaatgggaatccagcttgaggtagaggtcttataaaaactcactcttcaaaatgtctttacaaaacaacacagcaatagatttagggacactggatctatatttctgcagatcttagcaaataattctcagcagtcactggaacacagttctgtttgccccctaagtcccactcaactctgttcatacctcccacatcccttaaccctccttccagccatccccactctgctgcaaaggacccagcatacagggattcttctgactcctgaaggcagcagaggagtgctcccaggcccccatagctgcttgggcagtgctcctacctgcatcacactcagtggtgctcccctctataaagctggagccttggggacaggcacagctgtatcctccaggtctcagaaggcagaggtggctgcagatctgtttgcaaaggttgggcactggaaagcgggtgagaacagcagttaggtcctgacagaatgaataacctgaatacccagcaactggaagtggctctgccaggtgacagcagagcctaggcatcctctcaatacctctcgtccacgtgtcagctggccactcaccctcatttacactatcatctctgccaccacactgcagtgggatagtccctctctgggccctccagccaatttctgtaccactcacattttctattggcatcacttatcttctctgctgccctgagaggtttggaaggtgggtatctggttcactgcctaacctcaaaatctactcagtgctaaacaacttgagatggttcaaaagaccagtgagatccacatattataccaagatttgtcactacccaaaactggacagatcataacatatggtctatccaaagtatactggatgtgatttccaccccaaccctccaaggagacatttcttctgggtttcagttaccttaattgcaagaaaagggaatttagagcaatggttcctcataatcacctgggagctattcaaaactattgatgccaggccaggcgcggtggctcacacctgtaatcccagcactttgggaggccgctttgggcggatcacgaggtcaggagatcgagaccatcctggctaacacagtgaaacctcgtctctactaaaaatacaaaaaaaaaattagctgggcgtggtggcgggcacctgtagtcccaggtactcaggaggctgaggcaggagaatggtgtgaacccaggaggcggagcttgcagtgagccgagattgcaccactgcactccagccagggcgacagagcaagattccgtctcaaaaacaaaaaacaaacaaacaaaaaaacctattgatgcccattcacagagattcagatttgaattggtctggggtagagttcaagtattaccattaaaagctccctaggtaagtctagagccttattaattctaccttagcatgtattatgatttatccaagggttgtactggagtggataatctttacattccttctcagactaacattctgtgatcctgattgtctgtcattcaagatgtaaccacagacaaagcatagctataaattagtaacacatcttccaaaagcctccatcaatatctgtctcattaccatttcgtcggccctccagagtggagattttcaaacttgaatgtgctatccatcacctggggaatcttgctaaaatgcagattctgattcagaaggtctggggtgggcctgagagactgcatttctagccagctcccataaggatcccaagactcctggcccatggcccacactctgagtagcaagggactggagcagcggttctcaaaatgtggtcactgaaccagcagcatcaacgtcacaggagaactagaaatgcaaattcttaggccacctcaggcatattgcatcagaagtgcaacagatggggcccacgaatctatatttaacaagctctccagataattctgaggcatgctcaactttcagaactcttggttcaaacaggctgggctggggctgtactccccatccccacccccacccccacccccactccaccagcactttccaaaggagccgccttccctgagcatcagctgccggagggagatgcttttccttcaggggcagcctccagactttcctctgccttctcctcagggtccagaggcggtagggaggggagatagcctttccaggtgtactgtgccttcctctcctacctttaaaattgccaagtgtgagagccgcaagggcacttaggacacaaaagctattctattggtagggtctggagtattctggagtgttttggtgatatacttccaaaacaaggaagccatgccctagaaaaggcatttgccacccctgtcatctcatgggagtctcagctttgagttgcaatttttcaaggctgatcaaggtctcaaaatatcagcagactcaagacaaccccagactccacccatgactcacatatggggacaggaagggagtaacttgtcaaaggccacatatccatagcattcaacctgggactttggcatactgaacactgggccaatacagcaagatgctgagttttgggttggatagaattgaacctaaaaattatttcatttctgagattaaaactcacccatttgttatgtgacttaggcacacaagttactaaatctgtctcggcctcagtttctttatttgagatgagaataaaatgtctttataaggtttgggaggtctttataaggtaattgaagtaatagatggctgaattaacactgaagagagaatttgacataagaacttagtaaaaggctatttcctttcctcacttccctttgcctttcatcttgctccacacactgctgaaggataaattagcgcacaggtaacctgaggaagcagggcccagaagtgggaaagtgagacagaggggagcgggtaggaatgcacatgactggccattttaaactaagacctacatatctcaggttgacctgactagcctagccttgcaatgggaaggataagatttctgatgcctatgaaacccattttgtgacttgttaacccaactcacatttagcaggggactgatgtctgctggattctgtggcctagaagtacatatccatcactccaaacaatgatgagggctaatatttttacttacctgctgatggtttgcataatttcatttgaccaccaattttatctttctttggtgaaaatggttaaaacgttcctctcccccagcaaacgtacatacacatatacccctttcatgcaccaagagattagcttgttgttatctactgccatcttccagcaatatagccattattttgaaataagatttccaagtaatgaggagcatcttataccaaagttggtgattacctgacttattgtatctgagttgatgaaagattcgaacttgagtgagccaagggttcactaccagcgttttctctttctttccttgcccaaatttattttgtttccatacttctcccttttccttagatatccagtataactggtcttcaaagatgtccaggctgtaagggttcattgctgcttacccacaggggaaaaacaaaacagaaggttattgaaaagaaaatacccactacaccctaccgccacttctagatctgatgtcattctgcttgaattattccctcatacaatgccttgaagctctgggaatattcaggctgactttagctacatgggactgtgaaagtgtgctgcattaggaggtcaagaagatagaaattaaaccacattgatgtataccacccgacaccaatcacagggccctagctcactttcaagttactgattttactgcatttttggaaaacaatttaaatggcaagattttatgttttcttttgaacataagacatctatctgaccaaataggaaaaatgtgatatgtgctgggtcattgcaattctgcagagtctgaacaacaacaacaaaaaatgttcatctcctagatatttacagttgtgcatactgggcaatctagtaaagtgaaaatgaatgtgtccagaagcggttagacatgaattaacattggtacacatgaaaccacctctactggggcaacctaacaggaaactcagttatttcaatatcttctgctgagaagcatttttttttaaagttgtgtaaaaaggacgaaaaggatttaattattgctaatgaactcatctgcatttaattcagcaggtgggagttggtgggggtggaggggtggtatctaaaaaactatataagccatttcctaagagcagggctccttcttgagaaaacaggcaaagacattagaaatatgttaattattaatttaatatattactttctaactaatttctaaccttcctttgcaatgactctcctatcagtcccatcatattttatggtttcaataacgtcctccttgaagtcactccagtagattcggtcattgttcaaataatcgatagaaaggccagttggccaaccaaggtcctcgaaaaccaggatgttgcggtcctctccattcatccaggcagactcgattttaggttcctttccccagtcagtccagaacataagcctataacagaagatttcttcactgtagcatctcacctggtaagacttctccactacagcagagcacagggcattacctacagggaaaccaactgtttatctcagggacctgggtgctcagtgacaccagttttatattttacagaagatggggagcaaaaataggggcgcaagagcacatatgatttatccttcttgaaaactgcacctccttaatagaaattggccgaaggatggatattcagaccctttaaaatgcattatgaaagctgtattatgaaagctgttcactcttcaagaaatattattgaaggcctactgtgtaagaggcactgttctgtgtttgggatctatcagagaacaaaacatacaaagatttctatcttcatggagctactctgttgcccaggctggaatgcagcgacataatcatagctcactacactcctgggctcaagcgatcctctcatctcagcctcctgagtagctaggactacaggcatgtgccaccatgcctggctagttttttgtgtttttagtagagacgtggtttgaccagtgctgcccaggctggtcttgaactcctggactcaagcaatccccccacttcagcctcccaaagtgttgggattacaggagtgagccaccacacccagcaactctttttaaatatgtcttttgcatccaattaataattaattgtagagcaagggtctatgtaagcaaagatgatctcacattgaattacctagaccagggattgcatgatttcaaatacctggagaggaacaggtatgtaagatgaatgaggagagatcccggttgtaaatatcaagtgatgcggagagcaagaccctgtgtaagagctcctgtcagtgcccaggaaggcagacctacccagtgtaatccgctcctctgatttccaaagcaagaaatacaggttttctttcttttcttaaattttaaatgtcagcactatgttaaaaaaaaaaaaatcttaaagctctgtgttgtcccagccaaatatgtcctatgggccatatttggcccaccagccgctgctttgcagcctgtagtctaaaccagtcatcaggcataggccaagttttaaattctactgacgaatgtgtggattttagacaaactgggctctggaaaaaatgcagccaggggcctttaaagtctcaacaactggtaaataccaccttgtttggttttcattaaaaaggacacacatgtgaaagaagctagtcacaaagaaccacatactgtaggattccatttgtaggaaatgtccagaataggcaaatctatagagacagagagcagattagcaggtactgagggcaggaaaatggtggctcagaggaacagggtttctttgtagggtgatgaaaatgctttaaaaccgattatgatgatggatacacaactctgcatataccaaaagccagtgaattgtacactttaaatgggtaagttgtatcataccatacataccatatgtgaattatataagctgttttcttaaagataataagccaggcatggtggtgtgcaagtagaaggctgaggcaggggactgcttgagcccaggagttcaaggctgcagtgagctatgatcatgccactgcactccagtctgggtgacagagcaagaccctgtctatataagtaaattaattaattcaatttaatttaaattaaaaagtattaaatactcaaaactaaaaaaaacaaaacgtagggaatggaatggaaaaaacacacaaaaggtacacagaatgatttttgtttcctccatgacttcgtttatgctattgcctgagcttctgaacagccggcctggctcctttgcctatcagtacccaagacatccatctaggttctatgtcagtcccactttctctgggaagtggcccttctcactctcacccacattgacctcacatgtcacatactttatcactggttatactaccagtggatcccaaccttcaacattcagttcagtgctactttctccatagagcttccctgaacccttgtaaggtaggagaactatcacagtgtttttcagcagtgtcctcatgacaattctccctttgtatcttatattatagtcaacagttgctgtctgaaggagcatggtgttattttacccatctatgtaaataagggatagaaacctatgactaatttatagatcctttgtacaattcaaatgagtttatatatgtaggacacttagcagagtagctggcacacagcaagaatagaataaatgttggcacttctcattgctgttgctggtattatcagtagttatcatcttcatcatcctttggacccactggcagatcttataccgcagaagctgtaagaaggttcaacacatcatatatgcttatgcttataaaacttatggatgatgagcctttcaaatggatcatgaaatgaggaggttgtaggtcgggtctgcaggccttaggcagtgaaaccctttctcactcctttcttacttcctatccctcacaggactacactgagccattccagagagaaaggaattacaaagactaaaataagaatttctggccaggtgtggtggctcacacctgtaatcccagcacactgggagggcgaggcagatggatcacctgaggtcaggagttcaagaccaggctgcccaacatggtgaaaccctgtctctactgaaaatacaaaaattagcccagtgtggtggtgggtgcctataatcccagctgccaggaggctgaggcaggagaatcacttgaatcttggagacagaggttgcagtgagccgagatcatgccactgcactccagcctgggcaacagagcaacactccatctccaaaaaaattaaaaaaaaaaaagaatttctatgaaaaaaacagtggagggatatcagagtatgataataatatcagatgaatttaaacattagttacagaggaaaaaattaaacggcacactggaaacagtcacatcattcacaccatagaacacactgcatctctttgctcctaatatattgtgtagataagatataagcagcaatgactaatgctgaggacaagtcctcactacaggttaatctcatcagtcaagtatttttcatatttcattgctgagtttctgagggtatgatttaacatatgaaatataacagaattaaagtaataacagctcatagggttctacctacaaatactggcatatctacagagggctagactggtcctgcccaagtaggaaaattatttggggtcattcaaaaaacttttttaaagtgtcactattctgaagctaagctaatatgtaaataccaagtcatttcagcttagtgattattcaaataaatgtcttgaaatgtagagaaaaataacaaaacttgttctcatttacactgagatgatttatagataaattgcaaattggaatatttatacaaatggataatatatatttatacatgtgtcattttaaatatttatatattttggatataaatgtttaatttttaaatgaaatatgaccaaatccctagctggatttcaatgaatgagttactttaaaacatccaaatgaaaggaaaaacaattctgttgaaaccttcacttaaaacagttatatccacaaagaactttagagttcagagctctgatttggcaaggaatccatgtaactagaaagattctcagatgtgttctaaaggaatttccccatcagaaatggttggttctatatgatctcaagggcatgttataattcttgaaacagtcatagacgctactcccaaaaacttgaaggacaatttcagttaaactaggaaaaaaaaattataagaaacatggaatttgatgagaatccagggagaaatatctagatgttgaagacttctccaagtacttaccctagtttgggattcacagcaatagcagctggttggtccaggtcagtggaaatcagccactttctgtaccttccatcaagtttagccacctcaatgcgtttattcttgacatctgaccagtaaatatgcctgaattcagagggacaaagttaaacaactgcaaagcctagagtaatcattactgggtaagaggtttgaagatgagagcatttcgtttggctggtgagacagctgctcagatacctatcatcagaccatagtccccctctcttgggggaactacagccaaggggacatgtttggcaggttacacttggaagagtaaggaattgaggggactcctgcccaacagccaaagcacctgaatcacgcaggatccacaatggaattaactcaattccaaagactaaacaggaaagtcaaatttccaatctgttttaactacaagcctgctaaatacacaagatgtggattgctcgtccccaagataactaccatagacacagcagtcagactggcctctgactggcattattatgagacatgggcttctaggtagaagtcataaggcacggtggggctggtgccttaactctgactgcccatgagtctgtttcctcctcaggaaagagccccgttagaatcaataggaacctggtgtcagctcaaagatgagtggaaacagccttttaaaataacaaactcggcaagactgtcctgccttatttccacttctgaggctgcaggtctcagtctcttacaagcagaaaaagttccaccactttcttaattctcttattcattaaggctgagaaagaggtaaaacttcaaacaagaagacagatctgccattccctggttggttttcagaagagagtgttaatgtctggagttttgagttcctgactctagcaacagtactctaaggccctgtttcttgactgaaaatgctaaaatgagtctcctgttagcctgcaggcacagcgggacccaattagcttcttcaaagatgctcttccaggaacaccagccacattttttaaaaggtgaaaaagaatttacactgaaaataactatccattctccaggagagtagtgtctcctgaaccttccccctcaaacatgtttgcattattggttcattttcaaggaatcattttcccaccaatgtaagtcagtgcaaacctcttccttgaagaatgagcttactaacttctccacatccatttgtacctcacacacctacctgatgataaccctacttaagttctacttaaaaaccatccaaaatgtgtggctctggtccctgggccactagaaggtctagaagaacagaagagactgacacctctattaactcaattccaaagacttctttagtcaaatttccaatctgttttaactagaagcctgctaaaaacacaagatgtggattgttcgtccccaagataactaccatagaaaaaaagtttcatctcaactgctttgctgggagaattgtgaggctgtcccatttcttcacaaaatgagcagtgctgccatactgaaagttaattttggaatccagaactctgttggcaagaatgctattcacttatagtaaatataatattcactattatatcctagatataatatctatatccagatattgacctgggtgctttcccaatttttttcatggcccacaaagaatacaggatatgataatgtctccatgacatgctggggtaagtggaggtagttgctggggcttcagcaagcccaaccactgcccagctgcacccatggctgagtgtactcatatccaggcccagactcactcatggcccatggagtgcagtagagaactctaaccaggaaaacagaacaggtaaggggggaatgtatggcaaatttaccttccaacccagtccactgctattccatctggctgcattacgtatttcagtttcaggtcaacttcctgcacaagattattgcggccggattcaaagttggggatgtaggcacgtttgatagcaccaaacctagagccctcccctcgcacagtgtaatacacaacacctacagaggaagacacacaggtcagtttcatgtcaagagcatcaagtaaaggaagaacaggggtctaatcaggtgaagtactgttcgtttattgacatctctacctccctcctcactgttgttataatatgaataattcaatgacatcagtataatcaaactttaaaacctatcaaacttgagctatgagctacaaatgcttcaactgagaacttagtgagatttagtcatctctatttaaaagtgattcatttaaacgtatttcaacaaagtgcttatttactcttattaggatcaagttctagtttccaaaacagaatgtatagagataaaccagggcaggctgttgagaatttgaaagcatactcaagatcagaggcaataaagaagccatgtcaacgagaagtcctattttatatacagacagaaggatggtggacagcaggcatgttaaaagcataggaagactgtgactgtagagggatgcactggacacctgctgctttcctaggtatgcaccattcttgaaaagtgtattgtattgcatgaatatgtgtgaaaatacaccaataataaatcctacattggtatagttattgatagttttcaaagcctttcatatctactatctcattcaatcttccaaacaactctcagaggtaagcagacagaacaagattactactttgattttgtagaaaaaaaattgagattcagagaatcgttacaattatttaggatcacaaagctagtagataagggagactggcataaaagataagtttacaggcacagaagacaagttttctgactcctaccctactgtcatctcccccaacaccagatagagccatgagagattcaacaataagcattattcatctttttccttcattcaactaaattttttgatcacctaccacatagagtgtactagatgttgggtcagctgctaggcatttagagataaattagattcagtctttgtccccaaaaagcagatgtctagaggatagaaagatattatgtggtcaactagctatataacttagagtaacatgtgccataaaatgacatagattcatggtgagcaatcatagaactctgccagaaggagtgatagaagttgtcacagaggtggtgacattaaactgggtctttgaggtctgagtagaaattttcaaggtgtacaatggtaggaaggaacaagatctgcagtatcaaggacaaggaaatttcaaaatacaagaagatgtgagatggtccagaaaggataaaccccagtgatcggaggagttttagaaagaaatcaggaaagcttggctgggattcaaggccacgctaaggcatcaggagcatgctggattggaagagtttcctcctccactaatgcaacaaaattcactcattaaacaataaattccttaaaagtcaacaccttaaaattctataaagtcacttaatatcaatgaaagatgccaaagtttatactcactgaggcctatgtccttgggatcccaatcataatcaacagcttggatatattcctcatcttgaagatactctgagaacctctcagatgagagattatattttcgaattcggacattgtcaggcagtagcaacaaaggagagctacctgtaaacaaacaaagggctactttatctgtttgaattatactttcctatataaagtaggatataaaatgcacagtatgtacctgtcccctttttaaagaacatgagtttttataggaatctgactatctctgttaatcaataaagctgactctccaactgggttacaaaatccgtgacttgacattctccacttcaagtggaaagctaatatgtctcttagggacattatcagttctttattctttgtactcagtggtagtatggaacaaagctagactgagaaccctacgtacagtcctcattttcactgaattgtttttatttactgacatcaaaacagactagactgcagacattctatctcacagaagaaatacttttatagtcttactaaaagtttaccagaaaagtctcattccttactgtttcctgacagattttatgattctttttagcaggtaatcagctctatgacccaatttagctcctagctaatgacaaaataaacctagcttgtccttgatttaatttttttaacctaaagcagctacttaatggtgactcatcccaagatgcactgtctagaatttgttaagtttaatttacttgcataatgtcaactgaatccaatttaagtaacttttaaaagttcattttatatatttcctctatcttgacattatgttttatatgaatattccaatttgtttcagtcatgtccttagttaaaggatttaaacatttaaaaaattgctgcttaattaccagaccaactgttcaaatgctttcactctagttttcattcactgtcaacagtgttttgagggtaaaatatgtaagtatgctagtcaaatgtatgctttaaaagctcaatttgtatgaagaaattgaacagccattttggccatttactcttaatttacaaaataaagtgctattttcttatcaagttccttaaactctagtacaaacttcaaattcaaaataaagacccatgcctcttaactaggatatgatgatttagatcaggcctctggaatttggagtataatacatctgacttacattctttctctgttttattaggcccgattgtcagacactggcatcaacctaaaacgtaaaactcatgattgaagttatgactgtgccagactcctttctgcctgtgatcagtagtccatgaacaatacaaaagggatatgtccttgatttgccccaattcacgagccctcttggactactgggcctcaaatcttattctcagtggagtgggagctagagggccttgttaccttccttttattgatgaccatcccataggcaagcttttgttattgtttgagccttaagaaagatgacatcttgtccactttttgaagtttttatcaaggtagacaagaggctaaatccattataataagtaacacctggctcttgttttaattgctacatatttgttgggggatgtagctattgttttaagctggcaggggaggagagagaaggagcgactaaagaggtgttggaagagaagcagctggcgagtttaaaaaaaaagaaagaaaagaaaaactatgagaagctgaagtttctttcatcgtatagtgtacttagcagtatttatttccccaaaagtcaattaatcccaacatgaacccatcataccctcagctgcacatcgttttccagggcggtcactcatagacgtgaagccatcagcacagacacactcataacttcctttggtatttctgcagtgctggggacaagtcccaaattgttcacattcattgatatctgtaggcaaaataaaaccaaatacgcaacatctgttcccatccattccttagagatcttgcttctgtttaaacccatattcaccagcaatgaggaccgagaagggtacagatgaaaataagcaatgatacaaacatttgtgaaacactaagtttcagatactgtttcacatgcttttcaaatattttcctcgtttagtcttgccaaaagactttaagaggtatggacgattaagcccacagtcccaaagctgataagcaatggagacaggatttaaactctatgactctgcaatagcagagcacattttccctttcagaaggcatatgttgtgttgtattgttcggtgtctcttcacttctgctaaccagcttcaggaacaggagtcattgatttagtttttcaattgagttcttaagcttcaagtccaaaaggaactcttacaatcttctgactatgacatatcatgaattagaaacagtaaattcaaatactaaaaggcacctaaaatcatgctcatcactcaccatcttgataagctaccttctgactccataccttacaactcatctatgtctggcgtaagtaggtgtataataaatacgtgttggttgtttgacttacaatgaagaaagtaagcctagtttgttttttaaattaactttgatttcacacactggtgcaataagcagccatcatcaccaaggccttcatcattcatatcaattccacagactctactgagcacacagtatctgacaagcactcaggtaggcactggtcagatagcatgcatgcaggtgggggaaagcaattcttgagtagtttaatgacctagaaccatgaaaccatgagtatggtaccattaagggaattaaatagtgatttatttaacaaaggggagtgggtggagaaccttagatgtaaagttcacctaaacaggaattggaaaaaatatactctacctagacaggaggttctgtcaaaaacattggtttcgaacccagctgtacaggagcagataaatcctccttcatttaattgggtacaattttgctcgcatatattttcagcacatgttctttcttttcctttatctgaaaaacaaaatcccagcattacaaaccagatcagccacaaataacagtcaagtggtgtatcaaaagaagcacctactcgtaaccaactataggacatcttgagataacccctttccataagccttggagaggacagagggcactgggggagtcaggattcctatttctgatcgtgatctgaataccatttagataaatgcatataatgctaaaactttgaggcaattttcacattatatgcagcactcctaggcttatcctcagagcatccaattctggactgcacaactatgaagcctgacactctacagctattaccacctgctctactatctttaatcctattgcaaatagatagatcaatagatagatagagagatagatgatagatcgatagatagataacagatagaaataaataaataaataaataaataaataaataaataaataaaagacatggatacagataggttagaacaaagttacaaataggaggaaattataaaattttaagaagactataatttccctaacattgaccaattgattatatacacacacacacacacacacacacacacacacacacaaatatatacatgtatatcaagtgttgaccagggtgcagtaaaatacatagagttctaaatcatacaactgctcttagagccataaattagtacacaaggaaagaaattttgtactatgtatgtatgcaccaaggactttaaaaatattcatactcttttacccagttattccatgttaatgaattttcccttgagaaggaatatgcagtataatttacgtttaaggattataaaaatatttacaataagaacatttgtttgtaaacaacttgaatgtatgttcagtgatagggaataaattatgttatagtataaaaaaactaagacattaatgatgcaccattactttatgtaacactaaaattgaatatgtctggaacttacgctgacatgttattaattgtaagatatatatcttggtttcaaagatgttaaaatataaaaaaatacatcttagaagcaataagttatgattatctacatgatgaattgctatgtgattattaaaatttatagtttcaaatgatactttgacatgggaaatacctataataaattgaaaaaaagactgaaaaactccatttagtatagaatatttcttaatttttcaaaatactaagaaatatttcttacatatacatatgcaaaaaaaagatagcaaaagtacaccaaactttaaaggttagttctcttttagtgatgggattcaaatgatttttacttttgattgttattgaactttcacagtaaaaaaaaaacaaaaaaaacacagtttatttttgtagagcccatataaatgatccctgttattctgatccagatgttccaagacagacttttaacagctcacactttaccctaacacttcattgttcatcattgccccaagatcttgtctctaccaatatctatccaagccatctggctttcatccttgtcattcttatcagtttgcttcttttatcctccatctatccccaaacctaggtcttacagaaaaactggcgaagatgaacatagatagtgagtgataatgggggaaagagaggcagtggttatctccattaaggatttaagcttcatctacctctcaaataaaaagtctcctggtcataggcttctgagtattttagccaaagagactgtggtatctcctgatttaattctttcaaatcaaaatagatttatatctatctgttttccatagtatgcaatgaggtgaacttaatcactctcagagtcctttagggtaaatgatcatatcactatatgtggtctgagtacattaagaacactgggtttcaaaaagaaaaataaccaaaataaagtacaatgaaattcaatggaatgctgcccttggagtgcagacttcaaagctgtatgcatgaaagtcttataataaagatcctagcctttattataggagctcttaacaactgtacattgttaaaacatctatttagattttctatttttttcatgagccattttcagagttttgtgtctttctaagaatttattcacttcacgtaagttgtttgatttattgccataaaatttgtcatagtatttccttactgtcctttgaatttctgtgagattagcagtgatatcccctctacattgctaaatgaatctgacctatgtttattaacttggatatcattgagccagtcacataacctccatgggtctcacatgcatcactagactttgtaatttcctcctagctctgaaatctataaagggattaggggtcccaggagtcaagaatttctggaccaagtgatccactaaatgagtcacccttttgtgaagcaagagtccttaacaagagcagaaaccacacgacactgtaggattcttcctaaaatgtgagggctttcttatcattgttttcatttgaaaatgatcaccattttaacccgtataactgatttccccaaacccaaacatatggcactctatttataaaagaaataccctactttccattttatgaagaaggaataagaactaccagagaaacagcaagtcaatctatctttatgatcacataaataatatttgcaacctgaggttaatttctttcctttatacctgaatggtgctagaaaaaatgctaatgtattttcattcccaaaaatttgccaagacagtagactttaggtgctcttaccacaaaaataatttttttaaagataactatgtgagataacggatatgttaatttgcttgattataacacatcactatatataagtacatcaaaatgtcatgttgtataccttcaattttaaaaaatcgaacaatgtgtcttaaacacttcagtgatgcttttggagaagaagaagatgaaggaggaggaggagaaggaagaagaagaaggagaagaggaggaaggagaaaaaagacaaaggcaaataaattaacagcacccaagaactagtatattaaaaaagaattctatgcctcaaattattagtccagagaaataagactgaattccatgtcacatattcacttaatatctgaaaagagaagctgcttccatacccgaattgtttgtgctacttatttccttaaaaaaaaaaaaacctgctactaattaaatgccatttgaaaagaaagtactgtagtctattttaagccacctatcagtctctgggagtcagaacccaaacctgccattcagttttgcaaattctatcatgttcaggcttttaaaatattttatcaagtcacttcattctgtcaataactccaagtcccacagaaaacgtatgtgaaataaatggcaagccaactcaatatggctggttattcatacctcttcgtaactcacgcaggagaaaaattgatagaaaatcctttggatgcctcaggaaaaagtcaattagagcccaagaagttgaaagcacatggagctcactaggatgactaagtcacaggctcctagagtttggagaagggcctcctttttcctgtgaggaaaccaaagactggagaggtcagtatgtgcccaaagtggcacagctagtggcagggatccagaggccagccctcctaacctggacttacatgactgctccaattctgcctctgacattctgtgtgaccacaaggaagttacttaagctctctgagctttattacatagacaataacagcaactcaatggggctaacttgagtaacacattaaataatgtatgtgaaagcactttatgagtcataaatggactacaaaggtgtgacttagtaacatgtcattttaacatttccatcaaaatattgagctagaattgttccttggttatgttcatcatccttttcctacacaaagtgctccctctactttcttttttgtttgattgtttgtttgtttgtttgttttgagacaaggtcttgctttattgcccaggctggagtacagtggcacaatcacagctcactgcagcccctacctgcactcaagccatccttccacctcatcctcttgagtatctgggactagaggtgcacaccactacacccagcaaatttttgtgtattttgttaagacggagtttcgccatgctgcccaggctgttcctgaactcctgggctcaagagatttgtctgcctcggcctcccaaagtgttgggattacaggcatgagccactgcatccagccactccctcaactttaaaaataaaaataaatgtcccttcccaggtcccctgtggcgttcccttcttgatcaaacaccctcagaaggattttcaggtaccaaggatactgcatttggcttaagatttttttcatgtatatactttaagttccagggtacatgtgcacaacgtgcaggtttgttacatatgtatgcatgtgccatgttggcttgctgcacccattaactcatcatttacattaggtatttctcctaatgctatccctcccccatcctcccaccataatgtgcagactaataaacaaaatatgtagccttaaagtgctaagaggcacccagtggactgggaagaggacttgctctgcagtgaaacagaccagagttcaaatcctgagtcaacctcttaatgacagtaagacctggccaattcgtttaacctctaagttcgttgctcatttgtacataagaaagagataataacatctaactcataagattgctaccaggcatgtagaatgtttgacacaatgtctggtctaggataagcactcagtcacagctagctatgggcttgactggaattcaagcaaaaagtacattaaggagaaaatgtggtcagtgtctacattatgttattgcatgttttaattaggtaaacctgagttactacaatgaactataaaaacaagtgtttacttactgcaacccagttcatcggaccagtcaccacagtcatcggcatcatcacacacattgtcatgtggaatgcaatgcccattgccacacttatattcatattctgtacaaggtttaggggtcggttttctacctgcaatgtaaaaacaagttaaaatcaaaactttttcttttatgaagcaagatacttccttctttgacagagacagtttgtgcttaccaaataaacaagtgcttccctacatttcccagtctcccttgcagctgggttaggaccatgtgaccagttctagccaacgtactgtcagttggaggtgccatgtgtcactactgggctgaagcaatgaaaagcacacgtgcctcctccgtgtctcctgtgctgctgcagcaaccttggaagccatgtgttccaggcagcacagctgcaagatgcaggagggctgtgaaaccagcgttggcctttatgagtgctcaataaggcttcattatgttacacccctgagatttcaggatatgctggttgcaacagctagtattaattactccgaataacatagagtgatgagggaagtagagtactgccataataaaaacataaaatatttggcattggattaacagtcaggaggcaagcaacaaggacactgatagtggaggcaggaaaggtggagatcatgttatgcaaagtcaaagcatttgataaagctatcacctcggaaaaactggaaggcagatcacatgcttactgaacctgtcaatcatggagcgaggttagaagatagaatgttagtaatgtgcattgattgccattcctgagtttggcaagatagtataagaaagagagaacctaagggaagaactggttaccttacaagcagaaataaaataaagcccagaaatttgctgtgtgagaaaagccacctgtatctacatcccaaacagtaaaagtctgaagtttaaaaggctgtgagacacgaaggcccaataaaacctcctcattggataaaatgactgcccatctatttttctacatggattggatgtaagtgacaataagttcagacagaactctatgaaggaaagaaagcaaagaaaaaagcagatttgagaactatgtctccaaaagagcactaggtcaggttactaacttttagaacaggctagaagcaaacagatcaaatgcctggtatgtttctgagagaaagatataaccaaataaaccaaaatactatgactgtttgagacttggaaaaaaaaacaaaaaacaactcctgggctcccgaccttctataagcaagaagtggggtgagaaagctgccgtgctggccctaatggtagcatatttccctttccctcttcatttgcagaggaaaatagacaagaaaaaactctcaaagggtagagtcagaaacagtgagagacattttaacacaggagctcctcccagagcagaggcatgagctaatcaataaataccctccactccccaaagaagggacctttacaatgtctgcccagagtggccatgtaatttactctcctttccaagccagtgtgcttttgaaagtgaaggtggtgctattcataattccactggggcagcagacatgaatcaggactgtcctgtgctaacatgtgtcatcccagcccagtgggacttcagaattgctatacattggtgatggccatgagtctccaattctttctttccaatgggagtgtttatttctattgtgttgcccctgttccgccaatacctatcaggcacagaaggcactgattgtttattagtttatgggtctcccaaccaagaggaaccacatctggaactgattgagtggctactgcccattacccagaggtcctggatttcagtttcggaatggactatgagctatgtcccttgggaaggggttaagggtgttctgtgtgtgagaagaaaatcataaaggagtatttagtgacacaagggtaaattgtatgagaatgcatattcttgcattttccagtctcccttacagttagagcagggccacgtgactggttctgaccaatggactatgagcaagaggatgtctgtcatttccaggctcaggaagttaagaagctgtgtgcctccaccatgttgatcttctcctgccttggcaaccttgaatgtgtccctgatggcataattatgggatggaggagggttgcttgactgtcattaaactttacatgagcaagaaatgaacctttgccattttaagccattgaaatgttgcaggttgcttcctgtggtgactggtagtggtctcccagactaaaaccctgttccttgaaaagaatagaagtttatggattcttttttccactctgggatttgaccatgtgctacaaatgtcttgctccattttttaaaaaatggcatttttagcaggggaaatggaaagagattttggggaagggggaaatctgctcaaattctttaaaaatattttatttctgggctttcatgcttttgcgctatgcctcaaataaacatattaatgctataatgtattaatgctatctctgccagtaataatgataacaggaatacgaacttgaaggttgtggtagtgtcaaagtcctccctgacagtctcctctgggatgggggctggaagtaagcattctgtggcaaagcgttctaagaccacatcaatacaagaaatagaaagtggagaaatcaggcatttatcttaattttcccagataatgtctttttggggaaaaaaataattggagtcggggaaatgattttcctcactgacattttctaggcaaattaaattgcccagaaaattggtcaactttccccttcaatggatagattttaaaacattttgaaagtgcagaaaaagtacagctatttcaatgcctcgattgttaaatgcagccagtttggaacttctatcttaaactaatctatcacttttctcttctgggaaatgaactttcattttcaacaaggatattagataagctctgttaacaccagtgctgccttgcttcacatgatctctgcagctgggcacctgcctagattagcaattagcaactcctgaaggctgaaggatgatcaaatctcatatttgaaaaaataaactattaatttgcgaggtgtggctcaatcagtatttagtgtttgttctcagtttcttatgagaaaagaggaggggaaggcttattaaatgttcaaacaaagactgaaaaattaatggatttgccagcatcatgctcaaatgagacaggaagaaacaggcagggttacatgtaagcaatgcatgtgtttgcatggtcttgtaaacaattatgtcagcagagatctgcagtcatgggcacaactctatagaacaaactgaaatcccagaggcacattttccaaactgcagaccacttggggtccttcctttttccttctcccttttgacttttgcttacagtgctcctctgtctcatcagttccatctccacagtcatccacaccattgcacacctcatgactataaatgcagcgattgttgtcacaccggaaacggtttggtgaattacagggaacatccactgaaaggaaagatagaaaaatgaaattacaagttaacagtagaatctaagtgtcaatatctaaaatactccagtgtcagcaccaggcttgcttcattcatgcactcatttactcatttgattaatcaatcagcagatacaccttacatgtatagtacacaccaaggcactgtgctaggcagtagatatgatgggaaacaagaaagacacagtccttgtcctcatggaactttcattctagtagagaaacaggcttttcaaattaaccattcaattacaactatgaaacatctactggggtgatctgacttaagttagggagaggaaggcttggaagaaacttcccatagattctgagtcagagaggaggatggcaggtctctggacctgaataaaggcctcggtggctggagcatggatcgtggagcacaatggtggctgtgaggctggacagactggcagtacatggactcttatcctaacagccaggaagccatttgtttgatcctcctgatggcagttgtcatagagtctctaccgcatgagtcttttattgaagctttaaattgtgttggattttccttcctgaattccctcacctcttacatttaaaatcgatatctcacaatcaaaccctgacacacttgctgtccagagtgagacctctagctgctgcctgtacagatgtgaggaactcaagggtagtccccaggtcccctacttgtttggtacagggaacatggttcactatgcgtgtaccacaaatgcagtgaactcaacatacatgtggtcttcacatgtggtctgtctttcacatggaggatttgggctgtctgattttccttccgccttggtatcacacacagggatcaagaggagagacttataataagattggttgaggggaaagggtcagatctaagggctgattcttggaagtattgttaatagaactattgcaataattatttgctgtgaaaggcaagttcaatattataaaacagtattggaaaccttttaatgtagctgtgtctctgactctccaaagtttatttttactagctatgggcattttaccttatggagagaagagatttcctaaggacttctttgaaagttaaacatgtctaagatgtgtctcaagattcatgaagttcaaagcaaaacaaggctagttcctaacaagtaaagaaaaatgttgggatgcaactgtgaaatataatgaacactaattaaagttttctgaggagaaacaaaatactaagatatatcatcttcacaagtcaaatctctgggctaaaaatgagtagtgatgaagctgggaaaggggatggaagatgcaacgtgaacttccaacaggagtgcttctccaggtcttgtctcctaggttaagggcttttacttacacaaaatcctgacactttagtttgcatcagaatcatttgaggggcctgttaatgtatagattgctgggcccttaattttcccacaaaattaaggccactttggggaaagagctcaaaaagcagggtctttgagttaatgcctttccttcctctacttcttttggtcttgatttttaatttctatttggatagggtgcatcccatgaatttgcatttctaacatattcccaagtggcactgacattcctagtccaggtaagacacttttgagaactattaccctagagttcctccaatgactcaaagcatgtagcaaaatgactgcaacaaactctatttacgttcacttcattaaaatcagtagttctcaaccaggggactaaactaaaaggctaagaagccttttaaaaatacgtatgtgcaggcttcattcttggagattctgctccatcaggtctaagcctagggtgaggccagggcatgtgattttgaaatacccctcctcctctgctactgacatgtacctgaattgagactcacaaacaagcagggtttaaaatatatatatatatatatatatatatatgcatcattcagcaagagggaattagatggccttgaattaccatgttaaaaggaagtgactgtaaagattaagaaagtcttagcattttctaaaggtgctccaggaagctctaggggtttggagagggtacttcaggggcacccaaagtaggatacagcaggagaggtacagcctcctccctacccttcctcagacttcaaccacaacagacctgcctttatttatgcatactaggttttcaagcaacatttcccttaaagacattgttttctaaggccataatacatttaaaaacatggaggttttcccaactttctcaggttacagagagaactgaagctggaagacccagtgaaataacaccaacgctgatcctgtgtccattcctaaacaattgtacaactgctctccaggctcacatgctacacgtaagaaacaatgagatttgacagacaacaccactcccattcactccgtttctctccctcttacagcacaggtgaagttcttcatctgaaccatcgccacagtcatcatcgccatcacatttccaatatggcgggatacaaacatggtttttgcattcgaacatagtagcctggcagtatgcaccatcaggaaagcgtgtggctgccatgggggaaaaaaacatattcaaattattatacaaattgactactttggggaagcttcctgctatttctcctttggctcttgccattatagcctgctcttctttattcatcaagatgtatagtggccttgacctgtctgaaagttgaacggactatgtcttaagggcagttgtcagagcccagtcagtttccaatggcatgaatcatccatggcatggacagcactggacttaatctctacaggcaaatgtcaagactggttttacccacatacatttataaagtctctttggcaaccacatcatcaacgataaccatcatggatggttatcatggatgatggttattgttgatggatcagcaataatgatgtataaacagtttgcattgattcaagtgatccataaagactcaaatctgagtaatcatgttggctttccagtttttgtagggaaaagaaagatcagacagttactgtgtctatgtagaaaaggaagacataagaaactccattttgatctctctcagtcttctcagtctctcatcccacctgaggagaaatacctacaggtgtggaggggctggcccccttcaagttttaatcatttttatactccatcgtgtgactgagaaaaattttaatgctataaattcaatatgttcgaatacccaacccaagttctttatactaatgtattcgttgcttgaatatttttttacctgaaatgttttttatctaattaatgatttgtatagtagctgataatatataaatactttgttagcacagattacttaatatattctccatttaaaatagcaaggaagtacacttgaacggccattgtgaaatgtatgattatgatgacttagaactcaggtgaactgatcattatcagtgcatgctgaacagacaatacttatggccttttaatctaagaagcggcagcggactgatgtctaaactatcatatccatgctctcaggtaagcagtactacatatgtgtctagggacttacgacaatcagcttcatcagacgcatccaaacagtcagcggatccatcgcatttcagttcactgtgtacacaatgtccacttgtacactgaaaatattcaggatggcaggtcctcatctctgaagagaaaagattgtcattccgagaaggccttgtcattttcagacagatattaggtacctggagtatagtggttactccatcacattcctatctacaccctgtgactggctcacagcaaacccacaacttgtggttagcaaattaatacattctcaaaactcacactttccccactcaacatacagagatggaagtacctagctccctaatattaaataatctccagctcttaagcttttcctcagaaatcggaattccccaatcttcaatgttttctaattttcctaagacccaacaccaaatcagtaaagagctataaaaattactttgggtttaggattactctgtcaatgatctgatctctacacaagagagtcataggagcacatgcatattccttagggtgactttccgtggaatagtagcaagatcaatgtctttgtttacaaggctaacgcagattaaaatctgctcctaagaagtgttgatattaaaattaaatgtttaaaattccttgctattttcctcaattatgactaatctagactgctatgagttaagaataatgcatagaaaatacagagcagaagatactgtgttatgctaaggtttacatattacacatatacaaaaataattttcctctaaaagccttataaacactaatttgaagcccctacactgtcacagtacaaaattctatggtaagcttctcaaatgacagttaccacagtcccgttcatctgagttgtccccacagtcgttgtaatggtcacagatccatcgcgagggaatgcactgctgattgacacatcgaaactcgctctctgtgcactcccggggagctggaaaggaaaggcacctggccatgagtgtgcaccaggaatcacatacaggagacatcttgtgagctgaccatagtgccctgggtgcccagcaccctcctgtgtcccaagccccagaggtgtgcttgggcaaatcattcaccctccaaaactagacctttcaccttaattttgagtctgtaaagaatggcctttattaagaagtttgtccaaaggtgatctgatctctctttctctcttgctctctctctctgtttttttttttttttttttttttgaaacaggatctttcaacattgcccaggctgactttgaactcctggtctaaagtaatcctccctgctcaggctcctgcgtagctgggactgcaggtgtgttccaccatgcccagcttgattttatcttaattttttctatttcgtgaaactctagataacctcttataggattcaacattgacttttattaataaaagacaaaatgccaattggattacccttttgtataagtttttagctaactgatatttgcaggtgtagtcagcttcctaaatctctcattgcttatcgcaagtggtgatcacttttttcttccaaaaggtaaacaaagttagaatgtgtttcattagtcaattagaaattgacgcatatcatgggtcagtgatatacactctgggcagggcttcattaagcttgttttcagaacacacattgagtgtgttctgaccatctaatttgatatgatctcagcctcttggcttcctttcctcaacctccctatccaatgccttgtagtcaataccttcgactgggagagagaaactaaaacctgtcctgttaattaactgttagccctcctaaaatagtcaactattctaggaagggtaataatgcaaacacaagttctctctcctctcctatgaaggccattttggggaaagagcttaagaagcagtgtctctgggttagcacccttcctccctctacttctctggtcctggttttctatttctattctatttatcttattacatttttcctttatcataagtcacctcaacttcttttggaaaaaaaagttggatgtaaataaattcaacacataaaagatattcttcagtaaataccttcctccaaaagcttgatttgaaacatctcagaaggagatgcttatgtctttagtggaagagaaagtagaaatgtactgaccagcagaaagaaagagatcagacagcttgatatcatcctacccattgaggatcaatgacatagacagttgaattatggacaaaaagcaaacatcacagctctggtggtatataaggaccataggactgtgaacactcaccacagttttcctcatctgagttatctccacagtcattttgcccatcacactgccaacgaagagggatgcagtggtgatttttacagcggaaatcccccacaggatggcatgtcctctcctctgcaaagcagtcattgcaaagacttcataaaccattggcagagaaatgcacaaagtagtattggcttccttgtgagacagtctgagaattgtattagctcactcttgaagctcccaaagagaggaatgccagcaacattcatggtcaacattccctcttttagctaccctgagcctatcctaccacttgaaactcgatccattcccattggtagaaaccatgcaaagaatgaaatggtatctggtttgtaatttgcaacaaaggcctggtatgggaggctaaaatgatgccataataaataaatattttgatcatattatcttcagtcaattggactcagtgttcttaaaagaatttagtatcttccttacttctcttccaactaaacccaacacacatactccagatgctttggtttcaagttagactatgactaatcttgacaaattccattaatttatctggctttcccatgttaccagagagactacagatgtccaatagataacagggaaaatcagagagacattcagaatatgaaaatccccaaataagaaatatcctaatttggaaatatcctttttagagatagatacgaagtcttttctctaacccctttccaccaatttcaaccaatttataaaattagagaaacaatttaaacttgtcaagtatgaataaggattctacatttggaagaaattacacaagtttctaacatcttaataacgtcttcctcaatgacagcatgacttaaagtgctacaaattaaatacccctggtaaccctgcaaaatgctacaaaaatgtaacatgttattagaagaatcaaccatttttttacagaggtaaacaaagaaaagatgacatgggaaatacactctcatctctcatctaataaatggcacttgacatgtgcactttcttgtccctccctccactcccctgtggcccctcctaccacagccttgctcatcactgttgtccctgcagtcatctacaccattgcacacggcccactttgggatgcagcggtaatttgttttgcagctgaattctgtgaagttgtcacagagatgggcagagctcactgaaaagggaggaggcatcaaagtcagaactgaaggtacaagaaagcacctttccattgtcacattgaggttgtggtactgaggaataacaatgaccatgttaccaagcaaaccgcctctggcgatatgtgtctgttttagatgtgatctgtttaccatgagcagaaaaatagtcctaagttttctcaatatgtcagcaccactcatttgttttacagtataactttgtgggtggggttggggaaggacagggtttgaagtaaaaaacctgggttgaagtgttaggtctgacactaaacagtaatgtaaccatccacttaatgtgaacctcagtttcctcatctgtaaaatggaattggttcacacccaccttccctacctcataacatttctctgtggctcaagtgagaaagcagtagatatataaaatataagttcttggtatcatattctggttggttagacattctatgtatcaaaaggaggtattagccacttcagaaacagagtctggttccacctgcaagccacacagctatactctgccttgcagtgccagagtttgcagggagtgccaagggggagcatcccatcagctgaaaaagaaagctccatgtcctctctcagtccccatggaagtttcctcgtgtctccctgctctggtcatgccttggtcctcccacaggaacttactgcattcttcaatgggctcatccgagtggtctccacaatcattatccacatcacacttccaggcctgcgggatgcagcggccattagcacaccgaaactggcccggccggcaggtcctgctggcacagtgggaactgtcttcatctgagttatcctcacagtcgttaaatgtgtcacactgccaggattctgggatgcaacgtttgttggcgcactgccattcattggagtcacagtggtgattctctgagagcagggacatttggttatcagcttggaaggcatcaagaatgaaagctcctaattgacatcagtgaatcctggatagcaggatcatgatttctttttagaggacttatttcctaatgtacttatcagtcagtactactacatggagcacttcttcttttgactattactgtctcccaaattcttaaatatctctttattgcatacagacttaagagataagaactgaacaccctgacctgttaagcataccttcctctgtccctattctcctactggaaaatagtcttcaaactttgtgtttgttactgttattgatgtgttgtttttagtttgggggaattttattttgtgcctatttgattatttatttattttcttgagaccaagtgagtgcagtggcacgatctcggctcactgcagcctcaacctccaggatcaagctatttttctactgcagcctcccaagtagctgggattacaggcacatgccaccatgccaggctaattttttgtattttttgtagagacaggcttttgccatgttgcctaggctggtgttggactcctgggctcaagcgatcgacctgcctcagcctcccaaactgttgggattacaggcatgagccactgtgctcagtcttttttttttttttttgccttttaaatggaaacataaataaatatgacaactgagagtccctgttaaaaatgggggtggaaacctctcgtttcctcctcaatgttagctctcaaaggggattcaatgcccagcacatggtgaagagccaccagtagagacaacttattgtctacttcaaccatttgccttgtaaaaaccttaagatttctaaaaaaaaaaaaaaaaaaacttcataaaaatagaaaaaggatggagcctgagtttccttctaggactttgaactggtttttagttcatgatattcaggaaatacccacagaatcatgatcgtatacaatcaacatagaagtcggaaaaagaggcataaagcgactcaacacaccacaaagaagacggtcttcatcagacccatcagggcaattttggtgagcattgcataaagtctgcgggctggtgcagttgccgtcactgcactggaactgtcccagtcggcagaagcgctgcgggcaaagggccagttcatcagagccatctgagcagtctttctgtccatcacatttccaccagataggaatgcacctgcacagagaacatacagcacttctttagcaaagcaccaggggcaacagttatctggagagaagaagtcaacactgaattccaagaaatgacatgcatgagctctctcgtggccctagaagaggatcaattaaatctcagttacaatggtgtattttcagagaaaacataacttggcaagatagaacaggtttcttaagatccaaatacaaactgaaaatgtgctcttaatatgatgaataaatttcctccacaaaaaaaaaacaataaacaaataaagagtgggtgttttgagctgtgttctaggagcagtgattggttgagattgtctgccagggtgatataaaagtattgtttgggaagttggagggcaataaaaactgttgagggtctttctcacgataaatgtatgctagattcttaatctcagatatcttatttaatcactacaatcgtctacctctgcatcttagatgctatgatctgcattaatgcctctctccatgccactctctaactcaggtcccctagttatcaatgggcctgtggacattgttaagaaaataatctgtggccatgtttcatagcaaacacaaatgatcaaaaatggatttgaatgtgtaaccctggatcccctagcataggcagctaaggagctaggccggcatagacatggaaaagacagtgaaattctattacttctagggacaatttttcagtatgtacttatatacactctggctccaatacttaagacaattagaaatgagaaatatatggtttgcttcctttctatgaaagtttgcatatataggcataacagtttggttagcaagctccttctattcatggaaaatattatctgaagttggaggctgagagtcttgctgtgttccacatgaaccaagttaattaaccaaaatcttgtctcactagaaaactcccatcccttggagccttgaaggtcaatgtctgtccacgggctagagaggcactgaggagaggggaaagagagccttacttttcattgttagcgcacaggaactgggtgctggagcacatgggcatgcagtaggtgctgccactcagctgaagggtgcggaagtcatctggacactcgcaagtgaacccttttcctcctggcttgatgaggcagagatgagaacagccaccattgttggtaccacagggattgctcactagtggaaaaggaagaaaatatgtgttcatttgctgaaagagagtatcaagcacagattagctgattacacatcttgactttaaactcatcacctcttagtaaaaaaaaaactatcctagatttatgattttcccaaaagttcctaaataaaacagatgatagagttatacaagcaacaaccctgtgctttaagaaagctcatttatatgctaccagaagtgagctatacccactggtgtttctgactagaaaagatgtgtttctccaagtcctgggaaagcaggcagtaaacttagcttatgttcatttgcctagacctaggttaaagttttaatttccaacagatgctatattcattccctcattctaagtatacaggtaacaagtttggccaaaaataatgtggatgaataaactgagcagcatctttactaattttcctggtcaccactttgaggtgaatatttgcttgaacttctaataaaaatgatatgaagaatattaacttccagaaagaaatactaaatttctttattttgctaattctcatttttccttaattccaagtttatcatatgttttagcaagacatcacaacaaagcagacccacaaaaaccagtctatccccaaaatatatttcagacctttatctttatttcagactctaaatcataaagttgctttaattgcataaaaggaatataagttcacaatcaaataaaaacaagttctcttacttaaaaaacactaaaacgcactgctcttgacattatcttctagaagataagaataatatctaatttatacacaatacaatatcatatgcatttatttagtatttagtatttagggctgaaatgccatatttttaattcctttaaaatacttcagtcttcccatagaaatagatgaagtaaatatggcaacatgataactgttaaatcttatcaaaaacaaaggaaaaaaaaaaagatgatcttgaagaattgagcgagttttaagaagatgaagagttctaggtagtctttcccaggggaagggggataaactctaaagatatttgcctactgtcaactttcagcatatgctttgaagaaaacactaacaagtgcaacaaactttttgtaaatcacgaagttcatgcttaaagacaatcatgacatgcacataacccaaggcaaccttgccaaacccctcaatcacctactcaccaatgggctgcctatatggatggtacacatggatgtcaaatggtctgtgtgttgtgttcaccagtgtctgtctatttgatccatcatatttgtttcccttttccactgtccttgtattccaatctgtccaataaatagtgtcttcaaaaatggtaatagcgaaagggtgaggcagtgccccatcatacaccgtgtgtcgatggtggccctccaaatcagagtacctgcagcagtaagcagaaacagttatgtgataaaggtaattcctctcctctaatgtcttgcaggataaaagaattcacaaatcaataaaattctacctcctagagataatataagttcagatcctcaaaactcctagtctttaattaaaacaaaaattaaacttaaaggatgaattcaaattgaacaaaagatgtagaagtgaaaaagcaatacttaacaaaataggaatagtgtcaggagtttaaataatcactaattcctaaccacagctgctttcctgcggatgaagctgttatagctgttgtaggtttatggcctcttatagtgatgttcctcattaagcacccttttgatatcctggggtgaacaccattcttgtttcttccaacaccattggaagaaatcagaagatagcaatattatactggaattctaccttctcattaacattccggaggggacgttattctaggagatagttgcattctcagtataacctgaggggaacacaacttacaggcctgcagggttaactttgcaaacaccagcaggacatttattattaatcgtgccatggcaccattagcgaatacttttacagatgaataaacctccagagaaggttctccgatttcaagatgttacaaaggatccacagccaaattcccaagtcctctcagttccaagggctttcattactgtgggtctatatcagaaatcatttctaaaatagtgaaaatttaatattttaaaaatttggaacagatcctaaaactcaaacaggagatagaacaagctagcaactaagaaacctgataatgttagccatgcaatgttaaaaatatttcccaaaatataatttatggtaacttataaaagtcataggaaaacttgaagatgtgcttggcctttgttgataaggatgcaggtaaatgaccagaaattagtcaccatctgatttatttatttatttatttatttatttatttatttatttatctagagatagtctgactctgttgcccaagctggagtacagttgcacaatgttggctcactgcaacctcctcctcctgggttcaagtgatcctcccacctcagtcttctgagtagctgggacaggcaggtgccagcacatccagctaatttttgtaatttttgtagagacagggtttcgtcatgttgcccaagctggtcttgaactcctgagttcatgcaatctgccctgctcagcctcccaaagagctgggactataagtgtgagccactgcacctagccaccatctgtttttctaaaaaaatcatagaccagaaagtagtcctgagaccttcccttccagttcatctgtaatctctgtagagagatctcagatatctctatgagtactttttgtcaagagtagaactacacagctgggtgcagtggctcacgcctgtaatcccaacacttagggaggcagaggcaggcagatcacctgaggtcgggagttcgagaccagcctgaccaacatggagaaaccctgtctctactaaaaatacaaaattagccaggtgtggtggtgcacgcctgtaataccagctcctcaggaggctgagacaggggaattgcttgaacccaggaggcagaggttgtggtgagccgagatcacgccatcgcacttcagcctgggcaacaagagcgaatttccatctcaaaaaaaaaaagtaagagtagaactacaggcacagctccagtgatgtgttggtgcatcccaagatgtacaaggaatcaattgcatgctctataaaaatctattgctttatgcatctatgaaatatatttctgaacacaggcattgctacctctccaagaggtaaccaatttaacatggctcatgaatattaaagtttcctttattcccagatcacagtgcctcatattatgatttgacttttagactaaaatctactgcctaaattttataatccatctacgtaaataatctatattagattttatcaaaaagtgaacagaatattgtgtaactagaaaattccttttttcatctctaatgctcctggaaacactgtctaaatgtatgctgagtgacacctactaagctttcaagaccaagaataatctataggacccaaagaacaacaaatgtcagttagaaagttgttgaagcttctttgaacatcttgatgcttctactaattcaatataggattatatggaaagctaactcagctctttgatgtgccttttaagagaggatacacacactgtgggaagggctaagggtattaccatcagcatatcacatcaaaatggtataagtaaactagaaataatattgtactgcttctaattaaagttagtctctaccctaagagtgagttaatatctgctacggtaaattctgcaatgagaatgctaaaggctaccttagtgtagcaaatgaaccagttcaacaagagaaagtacttggattgattaattatgcctgccatgagcacaggaagaaagagcactggcgtgtgtgccaggtattccttctttttcagtggcatgtccccagggagcatggtgttagagaacttcaaactttactacactgactttggcagcaaaataaatataacagaagaaaggaatttctaaaaataaaataaaaaaatttgaaatagttctactgaatgaatggcatttccatgcttctgagtgcaacaggctgttcctggatcgttatccataaatgcttatgcagaagacaatactatggtccaactaggccataactagcaaaattcaatatgggtattgttgtttaatttttgattaataatgtgtatcatctttttacaatgagtattttttattgaacagtatatttaacacacttaaaaattatcctattaccagaaagatgtaaatgccttatcatattggattaatgttaacagactctactgccacctaaaacactgcactgcacttaaccataaatgtgccaaagtattttagggaaagttttccagatccttttattcttttccttttctcaaatactaaaatttattaatcatatatttcataggggagagcaaattaaagagataaaaaaaattaagatgagttgcacactgagctgactaccatggggagagattattagccccattttctagataaaaaaacaataagaagtgaaaacatcaggtcataaaccctgatccatatgatttaaaagttcaccctctttctactgcaccataccatagagctcagcagttttagttagaagtgtgacttcccccgaatgacttccaacagacaggccagttagacaatagaggggactaatagactggaatcacaagctctgatgtttgaaataaacagttacacaattgttttatgcttttctatgtacgtactctatgtaacccaggtgggcatctgcccagtagagtagatcattggtgtaatcaatggtgatgccattaggccactctaacttggtggagattatcacagacttgttggttccatccatgcctactctcccaatgtatgcgcggtgaccccagtctgcccagtagaggtacctgtcagggcaaacacaaagggtcagtccctgatgccaaaagaagtcagtagccaaaatacacaccttttctccatttagagaaatggagtctgcattctgtagagcagactgcattctgaattcttttctgcattcagaaaagaaagagagctaacagcaaataatctaaaaaagaaaaaggaaggggacaatgtacagaaaatgctcacaaataaacatagttaactggatttcagtggctttgacttcgagagtccagtaaagaaatcggttttctgaaaccacagttttctttgcatgcagccaaaatacaggacttgaaaagtgcaaaagtgtgtcagggaaaagaaaacagaagagctgatgatgatgatttgaagaagccatgcttctactcattacactaaacaatttaccaagtaggaaaagcagaagacaaaccccagcaagacattggccttgagatagttacatgaacagccttctcggtaacagaggcagaagaaggaggtgaaagaaaagcccaggattgcagggagacaatacccatattgagggtgaagggcaagtcctctgggattatcaaagcagaaggtgttgttggcatccacacagtgctgggccagcatgcggcggtgtccaccattgaggtcagagacaaagaggccatccaggcgggcatccaaccagtagagctttctaaaatggagagccaggagttaaccaatacagtcactttgtgaaatggtacatatttagccacccagtttcctacccaagctacctgagaatcacagacagttgttagaagtcacctttcttcaggcaaatgagggcaggggaaaacaggaagtttgtcttcctgcagtgaggcaacagagggtgcaagactgtgtgcaataattcccactttaaggtggtgtcatgtagaaaatacgggggacacacttcattcgacgggtctggttttactttcctcatgcagcataaggcaccctctccaggcagtgcaaaggcttagcagaacagggaagcagaggtgagtatcatgaattacagtttaaatggtggagtcaaggaaacacacttgtctaagtgtgtcattgaaactgcacagagaaactctgaattatgacattcttaagataaagattatgacatccttaggataaagagacatccctgcctctgtcagacaggctgtcaaaatgagtttctcaacctgagacacatttcacttaatcaaacctaagaagctttagaaacatattaggatctgttagaaactgctacctcaaggacatttctgttataaatgtatttttattcaataaaatttatttttcttataaggtaagtgttcttaacccaaggtctttacccagaatcagggaagccagctttggtgatctgtgtactttctaaaggggcccagggctttcaccagagtcttatagcatccataaccttccaaagggttaaatgcacctatagtgagaaggtcatttaggatttgataatcaattccaaccggaaggagaatgaaggagaatgatttcccttccaaaagacctgaatgcctctttgcaacaagtacgcgcttaaccattcatgctggatatctgaatagttaggacagtagcatcgcttcaggcttcagcaagaaagaatgagtatccatatatgtacaagtcttgccagttaattcacttgggtaaatgagtaaatcctgatgaatgagatggctacaatcttggattccatcatggtagacactaagaacagtgagaataatagtagctaattattgaacacttgttaaatgccaggcctcagaccagggactttttaaaacattatattatttcagatcacaacaggcttagaaggagttgctattattattcttgtcgtattagtattcctgttgctattaccattcaagtcctggcagactggctaccccatagggcactctactctgttgagcttactgctttcccattaatttctctttattccacagtcaaaagacatcctgtgaacagattcttctcaagaaaacatggagaagatattccgtctccactactggaaaaattaagataactgagagccaacagtatcttccaatgtgcgtaatggtggtttaaaaagttatatcaaatgcaagggctttggaaaccaaacaccctaatgctgacagcagaaatatttattaatattggagaaaaaagttgtttctaatttcagtgtagctagtatcttagaactgccccctaccaatgtaaatgtaactgggctccattctgcctttgtgttttcaggaacactgagcctggttgtgcaccctcctggactttcaagaaaagtttaccctaccctcacccagactttcttgcccatcttcctcacatgtatttaattctcttctgataaagaacacaccgagatagagaggaaatagctgaaatccaagagaaacgtcattctagcagtttctgagagagagggctgaatgacaatgtcttacagttcaaatattattttttctgcagtggaacaaaggatggtgacaagaacagtaccatgctcagttctgttcctggaaatcattaatcactatactttttgacatgtaggatacgtaaaacaggaattgatacatacaataggaatgcttagtcaacgtttcatttattatccagcaagcactcagcacctatgtcaggccagctactggtcagggagaactgggaagccaactgtccccacccattttaggatctttacccttaagggagtcaaatataaggatgtggggaagagccctctggaggtctgggctgactgcaacaagaatctttacagcatacatctttacagtgcctgcagattgatgtctattgaccacaaagccaattagtttatgctgccaagaatccgatagatttgatattcaatagagatgttaagaagtgtggttcatctggtagtttagttaaaatatcactggcctgccttaaagactgtcagtttccataagggcaatctcaaaacaagagtctcatgttagccattctccagttttcacgcccagcccatgctgggaatgactagtattggttgttttttttgttttgtttgttttgttttttttgagaaagggtctcactctgttactcaggctggagtgccatgcatgttctcagtccctgcaacctgcatctcctgggcttaagggatcctcctacctcagcctcatgagtagctgggactacagacgaacaccacctttcctggctaatttttttcattttccttagagacagatttcgccatgttgcccaggctggtcttgaacttctgggctcaagcgatcctctcacctcagcctcccaaagttctgagattacaggcgtgagccactgcccccggccaatgacaagtattgtaagcaaggctatgtacttcaggagagcaagggccatgtctgccttgttcccctcaaaacccctgctgcttgtcatcacgctgggcatgtaggagggactcaggaagtaacgactgaatgcaccaatgaatgcatgaatcgtcccttcatatcatctccagttaagtgaatggccagcaacagtgaactctcttcccttgcaattcctctttccataaaaatgatactataaatttttaaaataattagatattctgttctgaatctatcatttgaatatcagatacaaagcagaaaataaacctgcagaaacattaaatgtatctgcatattaacccaagttgaaaaattaatttcctatcaagatgaaaacatggttagaattttttaatttttaacttttaaaaagctcatcagtgttttcttacctggaaacccagtctacagccagactttctgcagctggtagtctgtggtttatgattgtctccttgtttgtcttattcagaaacattctctcaatgacttgcctctgtgtatcaatccaatacaatctcttctctactcggtcaaaatctaatgccacaacattgtccagtccttccaagatgagggagtaaaaatagccatctatagttaaatttctcaaatagtaacggttgctaaaaatgagatagggttcgatgttactgttttgccggcaggtctttccatctggttctcggaggtagcctggggcacacttacagatgtaggagcctattacattctcacacttctggctacagacaaaaggcatctctgtgcattcatcaatatcaacacaagtccgcttgtcagacatgagcttgtaaccaggacgacaggaacaatagaaactggttaaggtgtctgtgcagttgtgatcgcagccactgattgaagggtcatggcattcattaatgcctgtaggtaaaaagcagttcttagagatcctaaaatatcaacgaccaactcactataatggttcaaagtcaacatttctactaaacagtgccaattcttaatgaatcatgctaagacagacaacaaagacttccaaagactgtggattattgaaaagtcactatttttcaacttcctcaccaacttactccttcatcagtggtttcaacaactaatacaggagaaatgagaaagaagaggagaagaaaagagcctggccagtgtgctggtcaaacaggactcaggaaaaattttctaaatgctctgatttgtagcatgttccagtgtgactgttcacaccatggtcaagctcaggcttccagtgtgacatcactgaacatggaaccacaaagagatacacacatttgcctctcacgagatggcatgagctcaacactaggtgcaacacaacactacatgtccctctggctggtcctgtaacacatgggcaacctcacccaaaaatgatctacagagggaggacagcaagttcttattagttctctactcatcaaggagcaatagattaaaacttcatgcattgcaaaatccattatccaaatatcaggccaagctcttccactagttcactgtgcacccccaaacaattcgtttcccatctatgggctacagtcttattatctgcaaagagaacagggtacagaagatcactagtactccttccagttgtaagagtgaatgtttcataggtttggatgagacctactgagatcacttcgtcttcaagctaaaaattttaatttgaattatgtactattgaggatttaattcttatagttgaggtaaggcaaaattaattaaaatgcaatgggaatctatatgaattaggagtaaacataagaaagttccctatgatttttgtataaatgtataatatagcacatgtttttcttaatttattaaatggtttttgaaactttggtagaaatttatagaagtttttcttacaatagagcaaaagccagtttttggatgatttttaaatttttttctttttttttcttcaacttttaagttcaggggtacatgtgcgggatgtgcaagtttgttataataggtaaacacgtgccatggtggtttgctgcacagattttttaatattatgcatagataatctcttctccacatttccacagcagtttctgtctagcatttaattttaatgttatttcatataaatcttatctttcatataaggataaaaactacattacatacttctgggtcaattaggcaaatgctttcaatgagtactgacaatgaacaagtggaataaagaaaacaaaataaatgaaaggatatggtctctaaattgttattacagagacaatatcaacatacatgaaacaatggttacaaggattaaacaccacaaacaggacgaactgccaatattatggagttcaagatggtgctaagcaaacaatgcccatgctgtggattctcaactgctttacttgtggtggttggggtgagagagatattaaactctcccattcaattacctgaggacaaaaatgaagaacaggccaacgagttctagcagagggatgcttcaggcaaaaagtcattacaagaattcaaagagaatcaacctggttcccttcattcttgagtaccttatttggcaataatgttaaatgatggcctgaatatttgcccatcttctgttctctctaatgactatctaagcaaagaattggtccaaaaaaatgtgtgtccccatcttatataccaagaaactttggtaaccttttgctatatcaggaatagtgattttatggtaactttgtagttagaggacaggttggaaagtctaagtcgtgaagggttgagaatccatattcagtctcccctgtttccttttcccaaatcctctgttgtactcaccacagcctttctcatcgctgttgtccaaacagtcatctaggtggttgcagagtttcatcatctcgatgcagcgcccattgtcacacttgaactcgtgaggtggacacgtgggttctggggtgtggcacaggtgcatcagctcatcagatccgtctccacagtcattatcctcatcacagacgaaggttttactaatgcagcgcccgttctgacaggtaaactgattctgttggcaagtctggtataagcagcccctctcgtcgctatagtcaccacagtcattgtgccggtcacacctgtatcatgagatccagtaccactttcagagaggttggcaataaacctcaactattacccacttggggttttgcttccttctttatctacctaaatgccaggtcaaccatttcgacaagatcaccagtgtccttgatcccctttcccccatcatcttcgtctaccccactaatcgccaattctagaagaatccaatatttggcattccacacaacttcctcaggggctggctgctaccattagaaatgctaccattaaatgctaccatttaatagctatagataattagtaggtctatagctattaaaaataattgcattcattttttccttagttgataaactaattaaatacaacttttgtaattttggtatacatcagatctatgagacagcttatgaacagtggcactatctatgttcaacagataatgagatagccagtaggcactggcaatgtactgggtaatcacatgataaaagtgcccatacccaaatggaaactcatagggtgagtgctatatattataaataagattattgggtgtgtcctctaagaacacatatcttcccactggaataacgtttacattgtcagtcctgttccttccatctttcattacactcctgccatctatcatgagatgtgagtcttcatggtgatgtgaataaaggcaagctagtaggttagcatggcatactggcaaaggaagaaggcatgctgtagtactagaagctatctcgggacctaacatacacaggcatcattataacaatataatttcctgaagttctgtgagccaaactggcctttcttctccatattactccaagatcccataaaagttatgatgtctaaagggggtctcacatatgcatcaaggaatctttgataagagtgaacaaagctaatggttttgaacaatttatcatagaaagcataggagcggcacatagagcattacaaaatgtgaaggcaacaacggtgaatgtggtcagttttacaactgacctataaccaggcctgctaaccagcactgccatccataaacccagggccttgtcaacatgatttacagcaaaatgtgtgcatgtaattgtgaagaaagctgtggtcaaggcagactggctcagcttcatttggtctcccgggagctatttaactcatttccaaatggtttgaaaacaccaatgttttcctttgtctaatttagatccaatgcaggaggaaaaacaagtcatcaagcaaatcaccaagctttcagacactattgcaagtcagtattccagctcatcaccaaattgtcacccctcagtcttatcatccatgtttttcagcagcatcagtagtgagccaagaaaaaaagaaggtcaataggaaaaatgatctcctgtcccactgtaccaaatggggagcacactttctgccaagcaagcaaggagatgcacactaacagcacacctagtagaggctactccagacacagattttggacttacttagaagctgatagctcaggttttcaaacaaacagtatttttttttctcttctactatagcccttttcaaggaaattcagaaagctcaaggaaaaaaagaaagagagagagaaagggagggaaagtgaaggaaggaacaatggacgaacaaagaaagggagagaggaaatgttactgtgctgtgagatcatagtaatgataaaggaagaacccagaaagctcagaatgggaggaataaaggagataacttggagtctgatcaaaatcaacacctgctaccattcttgtgcctagagtctaagcctaggtattcagaatatatttacatctaagactaatgctattagctatttaccaaattcagaaaaactatagaagtgcaacacaatagaactcttgagcagtagggagaaaatatagacaaagatttatccactttaggtgcaaaaaataaaaatctacactttacattcatattacttaaatacaaacaaagcatattctactgcagcttcactacaaaagaagacagctccacctcttgaatgtctttgcattgtcagttcacaaactaccacctctcagcaatgtccactcatcagaggatgaatcacccacagagtgtattttcctgatagcatttatctactttttaaattactgctgagtccctgctccttcacctcctccttcttcctcaggaccaccacaataaacacacaatcgtacaccacactggactccaacggtacattagcgcctgttgatgagctgcctgcccctccagtcaatggcccctgtgactctgcttctctgatcttgtgcctacttagtatatctttcccactgtcttccttcgcatgctgtaaggtggccattcctgatgctctcaatgtgcctgtgtgtgtcccttaacagtccttggcacaagcaatatctcttcacggctccagttgtgcccaaatacctaagacatactttcacctcaggaagtcctactatgtcaaactcaccttccaccttgagcaagcgcctttctggactcccctacttttgctaatgctcgtactattttcctagtcaatcaggattgaaacttacaaattgttcttctccatttccttccataatccaagtatttgttaagtgggatgatgagaagttgggatgttaagaatgtatataaactgtttgaagaggcccatttggagaaagaggtaagaagtcaaacaatggaacattgcaggagaggtcccccaaaccagcaggctgtgagccgaatctgtttgatccacacagtgttttaagaattttaaaatttgtttccagcatttaaaatcagagtatttcaaatgaaaatccagatttccaacttctgtcaaaaagagagcatcagaaagtctggccttccagcccttctgcatgatattgatcaatgtctgcatccttagttggagacattgtctcagttcactccacctgcctctacttgactctgagcctaagagccaagctctatttatcatcatgcttgtgctgttatttttcttgtagtagagagaagagagtgaaacagttcttgtaataccaatgcctctactccaagtggaaaactaagcgggtcaccagcttcaagaaagaattcttatctcaagccctatccattcatctccctggccctctgtgcaaggccagattctgtctttcacaggccctaggcatttttgccttcttgggttccttcctccataaaaatattaaaaattatatttaattttaaattgttaatatggtattatgtattaataattcaagtaacttcttttcattttaatgcaatcatattggtataaagccagatatattaatattatatattaaaatactttctttgatgtaaaagttttttttccctttgatttggaaaggaatccaaacattttcataagccactaaaagcatcatgggccctgggcactgtggccacggggtgcctgataggtaagtgagcccagcccccatggacatttgaggcatgctgggtaacttctgaatcctcaattcacctgaatatctttgggatacacagtccgtaaccacaggtgaattcattttcagagcaagttctcctggtgcaattctgattctcatcgtagccgtcagtacaatccacatcgccatcacagacccaagactggggaatgcacctcctgtccggaggtctgtcatttacacagagaaactcggaatccgagcagttttgattctctgaaaccaaagcacgcaagaatcagaaagcatgagagctcagtgcagcagttaattctctttgctttaatgttacttaccattctaagtatgaaaggaaatgggaggaaaacacgtagacaaattacactgctattataataatagatcataataaaaatacctccaaagattccattttaattgctttggaccctggctttttcaaagaaatcaatacaataaaatgtctcatttatttttccataaaatacattagaatggtcatactttttcccttagggcttcagaaaaccactaccattttgttaactggataccgaatgccttatattttggtaactttttttagtttacaaagtataatcacacaagcacaatgtgaaataggtatttttacaccatttgtatagatgagaaaactgaagctcaaagatggttaactggatgtctcaaagtcatagaactaggtgaagagctggggcttcaaacctaggtctttctcctccaaatttagtgcttttccaactacattatagctaccaccccaagcaatattggggtggagaggaaaggcatatgctaacagagttgtcagaaaccatgatgctatgaggaaagaggtgagatgctgacatcaaatcattagtgtccacaaaataaaagaacaggggttttatccagactcattgcaggtgaataggaaacaaaagaaagaagatgatgttggtaaagacaggtgagagaaatgcatacaccacaatccatgtatgtgtagctgaaaaccacccatgtcagtggatagggtggatagggtaaatgtggagttgtgacccaccaccaaagtcacaacacaggagggtgccatcagatgcaagcagcagggagccattgagtctattgccctaccatagaaagacattattctaacaccgattagattaattcttgaactagctaagatttccataccctgttggtaatgaaaatgatgttccattatctactcaagaggcataacacccctccctccatgccgctttaaggtgacaaaggaaaccagagacagttcattgttatactgtgaaggttgctattaagagtggccaaccactgggtgcagtggctcatgcttgtaatcccagcactttgggaggccaaggcaagaggactgcttgagcccagtagtttgagattagcctagccaatatagtgagacttcgtctctacaaaaaaaaaagtataaaaaatcagccaggcatggtggtgggcgtatggtcccaactacttgggaggctgaagtgggaggatcgcttgagcctggaaggtggaggctgcactgagccatgataccgccactgcactccagcctgggcaacagagtaagaccttgtcaaaaaaaaaaaaaaagaaagaaagaaaagaaaaaagaaaaggagacaaccaagtatttgtgggttttttttttcccctagaaatgtaggacattatgtccattagccaaatgtaagagaaagaaagtaaacataaagtcatttttcatcactctgaagcatttaagtggatgatatcaaacactcccagcatggagaaacaaaggtaacattctatcagtgtccattcaattacagagaaatctgcaatcatactctccaaacacagaaaaacaactctactgtgtttccctggaatgtgactctgcagaggaattaattggcttcacttacgacactggtgccttttatcctcgtcactcatatccccacagtcattatcaccgtcacagatccattcgcttgggatgcacctcccaccatcacacttgaactcatcagctaggcatgttcgctcagagtgacctgaaaagatcaatagcattctcagtgaaaaaaagtggtttacagtccaggaatctggagacaagctggttgtagcatgggttgtctagaaaacctgaaacagagcattatttaattatatacatctagggtagtcctccaataagactagtaccagcgaccaacagtttgaggtaaaagtagtcaactgacagtgcaaagccctaattatctttggtgactaaaatgagatacaatattcccttatgtgtatggtagagaaagaacacttcttttcccaggaaagatatgaattacctactatttcacatgtttctattttaaaatctacttttcatccaaaaccattttgttttgtgcaaagtctcccctcgcctgcactccccatgcccgcttccttgctccctttccttctttccataacacttagcaccacctttcaacatactagacaatttactgattggttgcctgtctcccctctttagaatattagctccatgtgggtagggattgttgtcttattcactgacacagcccaaaagttcctagaacaccactgttcaataaatactgaattaaaataagtcactcttctacttcaaattagccatcactgattcagatgctctaaccctaaccccacatgttcctatttaactaatgaaggtgtcataggctcccaaacccaggggaccctggaattagcctaaggcaagagaaagtatagttgcaactgataaagacacagcctatatcataacagtaacaagaaacaggctctttcagaagctgctatgaaaagtgtgtacattgatccagacttttttttttttttttttttttggagacagagtctcactctgtggccaggctggagtgcagtggtgcgatctcggctcactgcaacctccgcctcccaggttcaagtgattctcctgcctgagtagctgggattacaggcgtgtgccaccgcgcccggctaattcttgtgtttttagtagagacaggtttcaccatgttggccaggatggtctcgatctcttgaccttgtgatccgcctgccttggcctcccaaagcgctaggattacaggcgtgagccaccgcgcctggcctgatccagattttttgaagagacatatctcctttgatacagcagcaccatttctggacatctagaccataaggatctttccacatgtgcacaaaggatgttcaccctgacactgtttttcatagtgaaaaaatggaaacaacctaaatgtccaaccactaggaaaaggataaaaatacatggaccattcgcattttaaaatattctttggcagtgtacaggaatgaggctggtctgtatttgctgacatgatgttaagcttaaaaaataaaagctaattgcagaaaatatgtatagtaagactccatctgtttttttaaaatctatatatcaagatatataaaagtaaagtaagatatataaaagataaaagtaagtcaaattcacactcaaccttttaatagtgattacctttgaggagtgaggggattggagaaggatgaaaaaatgtaaattttacttttttgtacatcgtattatttctttaaaatatatttctgaatattattactttactacaatgaggatatattcatatatagattatgtgcttatttttatttaaatatatcaggtcattggtactcactgctattactatggcttttgttaccatagagaagtttaaaaactcatattaattattcatatatttgaaccaataattcatacatttgaaacaatctctaagactattctactcatccagcagttattagttatttcctttacaggtcctcaaaactctatgtgccctttgctttctataaaactttcagtgttggggaaaaagaacttagtgaagcactccaaataccactcttcaacacagaatttaaacctgagagaaaactggaattgaaaatagtttgacttcagctataaaactatactaatgatcctaagaaaatatcctgaaaataaaatgttttaaatacgatgttaatatttactgcaatgatatatactatagaggaataaaataaaagcaacctaatgcttaataatagaggcagttaatttgatgatactataaccactcaatggaatattatagtcattaaaaggcagtatgaagacaaggacgagcaaactttttaactagatagtaaatattttaggcttacaggccctatggtctctgttgcacctacaggacgtggccatagtagagggacagcagccatatgtggctgcatttgagtaaaatgctatctataaagacaggcaactggccacagccatagttttctgactcctatatagcaatatgatttattgacaggttttttaaagcaatgtagaagattgtatttttatatttttacaattatgtaaaaaatgtgcatggatatagattagaatttgtgaaggcaaatagcagcctccaaatgtaaacagggcataactgtccccaggaatacaaccaaaggctcctgcaacttcttgggcctcttgtgctcataaactggcacagagagagaacaggaagaggatgcatgctcctaatatactccttccccatgtatatgactccaatcacttttaggtcctctgacagctttctgggccagcactcaaccaaattcagaaacttcaattgagagccaactaaaattaagttctaccagctaagcactgtattaggtgcatcaccaatataatttcattttatcagcatcaatcagcagcttccgtatcctgatcagctccccacacagtgctctccactaacaggtcttaatgaatatccgctgagcggtgtcagcattccagatgaaagctgggacaggaagtccaagcattcagcagccatgaccctggtctgtatttgaagcagttggaagagactgaagttgtctagctgcatcgtgatgtttttcatgcttgcttactctcttaccacaagaggcaggttcatcagaggcatcaaaacaatctgtttcttgatcacaataccaatgttgaggaatacagcgcccagatgcgcattggaactcactgctgctgcacgtgtgagtggctgcaggagggaaagaagataaaacccatgagcaaaacacaagcatgttcccatcagtcttaacaatctgcctctatctctgagctagataatagttaccaaaaaaggaagactgagcctggaaaatggatgcttgtgtaagctttctgtggggaggaagaagtatgggagacagaaggaagtcaatcctgccccaattccccaatttgtttttctagattccagaaatcaaaaaaaaaaaattgtatttgttagaaataccaaagaactatctttgtgataaatgaaatcacaaattataagtcttggttttattttttctactataatgtaagattaaataaattccattgcaatgataattaaaagcaaaacaataatgtgatcatatctaagctcgctccacacacaaccttttagctatgttagataataactctagaaagttggcaaagttatcttcgtattcatccttggaataccagacttttagttgagtaagtgggaaactctgcctatgtttgaacattgactcttttctccagtaattttaggtagctctggttatatgcattttccaaattgttatgtgggtgcacatctaattaaagtcttgtaattcttctggtctataaggccgttttgctttggcccctgatatctgatgatttgccaggggagaactgacaatggaagcagaggtccctgaaaagtcagcaataattcctatctgtctagccctatctggtggctgcaacctgaattctgcttccttgtgctgctgttattacaacagattcctcttcctgtgctgtaccctaatttggtgacaaataattatgatgccctttgatttccttgggaggggccagtgacaagagtttaactacatatacacagaacagggaagtccaatcactaaatccttaaattatgtatctatttacactaatagtctcaaagttatcaaacttaagaaaggccttttaatttgagctataaatacaggaaattgtttgaatgaaccaaattgctaaatacgaaatagagatttctgaaattccaacgtatctaggggatataaagatactttcagttactggtcaggcacggtggctcatacttgtaatcccagcactttgggaggctgagatgggtggatcgcttgagcccaagagttccagaccagcctgggtaacacagagaaaccccatatctacaaaaaatacaaaaattagctgggcatggtgtcacatgcacgtaatcccagctactcaggaggctgagatgggaggatggcttgagcacaggaggcagaggctgcggtgagctgtgatcacaccactacactacagcccaggtgacagagtgagactgtctgaaaaaaaaataattttcagttactgatggccactataataatattaagagtaaattataagggcttaacgggcaaattctgcctaagtacatgaaggcaaaaggctttcaacactgggagaaatggctctccaatagtagcagatctctggaagaaatattcagggtctgggaattctagccagggaacagagagaaagagtttctcatacccctgcaatcacatatgaaagcaactgcctaccacctctacttagaaggtcaatgtgaaatgacaattgaaatcagcccgaatacccacgcttcatatctttgtattagctcacaacatgcatctctggaacgatagaaagaaagcagttttatcttactcactgcaataagtagggttttcatcactgttatctccacagtcattgtctccgtcacacaaataaacgcgaggaatacaaatatttgaattatgacattttgtgtatccagactggcaagtgcgatcagcttgaaaaagacaaccagataaatattaggaatatatccaccaaatatgtattatgaacagtatccgtgctaacacatctattgtggaactcaaaccactggaagggcggcattttcaaagccatcagaaaggcaggatccatgatacttatgttacctatagattctgtagtaaaaaaacatatttccagctgatactggggagaagggagaggagacactggtttgtaacttaaatcatctgttttcattaattaatagcatcaacaagagttccaactcttggtaaaataaactatggcatttccacacaatggagtaatatgtagctattaaaggaataaagaagatttctatatactgataagtaatgacagtataatcttcaggatatattgttaatagtaagaaagcaagattcaaaacagtaggctaacttttgtgtaagaaaaaggacgatataagtgtatgtgtgtgtgtgtagcaagagagagatgcttatattaaaaacaataacaacaaagaaaagataaactaacaaaaattgtcatctctctggatagactgagaagagcacagaggaagcagaaaggagaggaagaaatgaaggacttctataaatgcacctcgtcatgtagttttaactttggaactatgtatgctattttgtacaaataaaatcaataaaataaaataaaatttggaaacagcaatagataaagctaactatatatcaggttgatagcataaccctgcagaaaaaaaaattccaaatatctttaaagtcatacctttgactgcatatctctagtgggacataatctaaaaagcaagaagaatctcgcacttagtagacttattgttaatagtattctttgagtggttataataatgttgaaattattataggcattttgaaattactatataataaaacaactaaatgtcaagagaaactatgattttaagcataagaagagatgtcattataaaatctaaaatgtaaacaacctgtaatcttaaatttcaatgggaaatatcaataaaaattttttctggccgggtgcagtggctcacgcctgtaatcccagcactttgggaggccaaggtgggcggatcatgaggtcaggagatcgagaccatcctggctaacatggtgaaacctcgtctctactaaaaaatacaaaaaattagccaggcatggtggcgggtgcctgtagtcccagctacccgggaggctgaggcaggagaatggcgtgaacccgggaggcagagcttgcagtgagctgagatcgcgtcactgcactccagcctgggcgatagagcaagactccatctcaaaaaaataaaaaaattttttttccttaaaaactgtatttcctagctctgaccattgaaaaggactagaagcaatgaaagctaagtaggaatgagcaactcaaccctgtgataatttctaagtaccacaaagggaatgaggtctccttggataagtggctaattccaggactgggacaggaaatataagacaagcttgagctataagaagatggattggggtcatgccaaagaacagaaaattcaagttaaggactcccattggcctaagtttggacaactgggcaccaagaaaaaacagttgacagcactgtattaaaactcatcaaatacatgaagatcaaagagttcaatataatactaaactaaactaaactaaacaaaaagttaattctcctttgtcaccaactcattactctgaaaattgacaagcaaaaggtatttatcctgtagattctaattaccaacaaaagctggtaagggaaatgtcttctttatcaaacttcagctaataaatgcggcaggaacactagaattctaaagagcccattcataactcttaaagaaataatgggtttacggaacaaccaccgatggatgctaaaaccactgggtgaaaggatgatgggagcttcataagagatgattcaggctgacaccagaatccacttaaagtggggcaacaaaacatcatgtgcctcataaggtgatgcaacaggaaaggcacagctccacctctgaaatactcttacccaaagaattgcacctgttatgatcaaaactctaggtctacataccagttcataggaaataagagggataagataaattaaatggatcaattatgcaattagtcaagtccagaatgtgagatattctacaggacaaatcacctaatctttctaatgaatcaatgacattaaaaagtgggaagtgttgtggcataaaagagattgaagaattataacaatcaaaatcagttgtagatctcatctgaaccctaacttgaacagagaacagtaaaaatacattttggggataagtgacaaaatttgaacatggactaggtactcagggatatttagtaagcacttttgattttgccaggcattataatggcatggtagttattttccaaaatgttatcagtgaagtgcatgactaggagtcactttaaaatactagaaaaaaggagagaaaaatgaaacaagattggtatttgttgatacttgctaccgcgcctagccaaaaatttacgttttagataaatacttagggtttttatttttggaaagccttttttttatataataatttcatctcctgtgatccaagacttcagacccaaaatcacaataagcacttaagataaacttacggcaatttttctcatctgaagtgttattatcatggcagttgtctacaccattgcagataaactcacgaggtatgcaccttctgttattgcacataaactccgtggtggcattgcagtccctgaacaggcaccctgcctcatcactgccatcaccacagtcattgtagtaatcacagcggtaagagtattggacacatcgcccattggcacaggtgaaggctgtcggtgagcaggtgtgaagtgctaagaacaggaaaaacatgagaacaaaccctcttgattaaaacattatcctaatttttaaaaagatacaattaaataaaagagacactttgaatttaccttccaaggcaaaaaacgctgcaaaatggactgcatgcaaagtgagataacacttttaattagttagattaagcaaaatatgttgtatacatttttaaaattgttttaggcacaaatcaagtaatttaagcacaaatcaaagtcattctgtttctctataatctcaatttatctcaatcacaaaaagcatgcaattatagtttatttcaggaaaataaaaactcctagcccctatcacagtctgctaggaaaaggtaaccaacctcagaactccctgagaaagtccactgtgttttattcactctattcagatggaagctgaggattggaagttattttcataaaatttttgaaataatgacctttgtgctacgaaaattggtaaaatgatacgtttccttagtcccaagctaagctagacttagcttgcaccatgcctcatgctaagggatttttacatattgtttctcttactcctcgcaagaaccctagtagtagctccattttacagatgagatgtctgaggcttgagatattaagtaactttcccaggtctatacagattacaaatgcgatcaccaggatgatgattgtgcttgtgctcttaaccactacagaggtgatttaacagaaacagtctggattatcagaggaaacatttttcagctctaccaggatgcctaggcacacatttcaaacacattcacacatagcaggattccataccaaacacttgacatcaagatgccattagctcctaccaaaagcgccaagagtccaactcaccacagacactttccatctcatcactgccatccccacagtcgttgtcattatcacacttccactcttccgagatgcagcgcccattggagcaggtgaaggaagatgcaccacatcgttcaccattgtccacaatgcagtgcttcctgttgttggccaaataccagttgccctcatgtggacactggcactcggcaccatttggacctgaagaaagataatcccagaagaagtaaaagatggatgcagccaccgttcacattgacccctccacaatagcacttgcaacagcttctacattaaatgctccctaagaagcgccatggaagttctgcccattaaccttttaactatattctgagtcacttttccatcaagaagagcaatcaccaatttctaataaatgtgccgattccttctaaacaacaggaaatatcaacgactcttctcagcaaaatttgcaaagcaacaacatcaaaaggcacatcttcccgtgaatttgttgttctttataaaatgcacaatgaagcacatatgatcccacccgcaaatatcaccagaaatatttcaaactataaataatacctcttaagcagaaaatgtaaatccttttataaggaaggccagctcattgacagaattcttagtcaagacatgaagtagggcagccaaggccttcatctttctttctaactccatcaagcttgtatttaaaatgccttcataggctgagtgctgtggctcacgcctgtaatcccagcattttgggaggccgaggtgggcaatctcttgaggccaagagtttgaaactagcctggccaacatggtgaagccccgtctctactaaaaatacaaaaattagctggacacgtcgtgtgcctgtagtcccagctactagggaggctgaagcaggagaatggcatgaacccaggaggtggaggttgcagtgagctgagatcccgccactgcactccagcctgggcgacagagtgagactccgtctcaaaaataaaataaaagaaaatgctttcataaaagggctccatatagattagaaaagaagcctgccaagtcttcctctcaaaatatagccccaggtctgtttcataaattaccctgacatcaaggagaatttgaattttttctcctgtgagaacttcagctttccttaccaattggtattgtgatcattattctccatgttctaattttcatggtcagtgccttacctggtgcacagatatggctgcagcccccattaaactgttcacaaggattgttacactgttgtttctggttcttcacaacagtgttgattcccctgggctgggagagcaaatttgtggtcattgcaatctgacctgacccgtcatatttgttagctcggtaaattctttgtgtgtacaagtcagtccagtaaatatactggccatagagagtcaagccaaaagcatgaacggctgcattgacaatgacttcacgatccacgcccgtcagagtgctgcgttcaatcctctgcctaaaatgaagcaaaaaaaaatttagaagttgaaatctcaagtgagttaagttttcaactggcagcccaatgcatgcgcctcatcattgtttacacaagctgcaaactttcttttcaaatggggcatatggcagctggaaatgtttcttctggtgatgggaggtcttgtttgcttatcaaacaatagcctatataaaatcattgacttccaaatatgaatagtaatcctacaaaaggaatcaggttgatattagaaacaggaaaacatgaaataatccatgtaatgcatggaactcagtgttaagcacatagcagactctcaataaaacaataacttttccatcccacttccttagtgactttttcaatttgatgtttattgagtaccttgaggtgtttacctagaataatccaagcttagactcaaagcatcactgctttgtttcaaataggagaataaagaaaagatcaggaggttaggtcttggcatcaaaagactaaaattccaaagaaatatgcaagaaaaattaagattcccgatatgtagacaccagccataataaacaaaatcatttcatcccttcaactattccattaggatgactggaatgtgagacatatggggggtacttggagaagttacatacaaaattagagttgacaaaaggaaaatattaagaaatgcgctgaggagaagcttgccagagaagaaagggtctatttgaaaagatgacaaaaagtcaaagactgaagaaaagaattttctttttttttttttaagaaaagaattttctaaaagacattgaatgctaaagcccagaaaaaaacataatatcaattggcatttaaaagtcattcagattttatagcagttacctagggcctgcagaatgtaagttgagtaatttcatttgtaattctaaattgagaaaatacatttataattatagctgaaattatagatatatttagcaatgcatctttagatgtcttttagttcataattattcaatgcatgatatagataaattttcacagtatgttcaccaagttccaatataaacatagttcctaaaactgtgattctatattctggcaatgtctatctggcatgctatattttcatcacatgatgcaaatccctcttctttggaaatggaagaaaaacctcttcttaacacccacatgagtaaccagagacacctacagactagcatccacccagtagagaaggtcctcttcatagtccagagtcagcccactgggcatgaccagactgctgttcacaatgggtacgcggaagtttcctcccaatgtggctctctcgattttggcatgtgtatcccagtcagcccagtacaggtacctagtcatacaaaaggagtcaataattaattcacagggaacctcatagtcctttaaaaaaaaaaaaaaggacaatattctttaattgcaaattgccagtaacatggcaaaagaaacttcatttctacttacacaacttgtccaaaggagatctagtaagtcagggtgttgacttcctagtatgttgccaacctttctgccatcaaagggagctatgcgctgcaccctccttcccacgtaaaatcactcaatatgctttcatttttgaatctgtagccatagttttataagcccataacacattggctatctatgaacataatttcaggccccattttttccagaaataagcagacagaaatataacaaggaagatgatggcatacccttggcagggatctaacacaattgctcttggttttggaacgcgggctatcacagtgcggttagacccatcttcagccatggaattaatcatctggttgaggtagtcactgtaataaattcttctagtaatccagtcaaaggcaatgccatcagcagtccctatacctggacacatacaggcagacacacacacaagcacacacaaagacattagagtctcatatgcattagaaacactcagtcatccatgtgtgttgaccccattgtgtctacttgcaggacaagcagcacctggagtgcacttacctgaagcaatgacagttggagtatggatccctgaagacagggtggcataggaaatctgtccaactccagaggctaaattttgtgtgaagtagattctatcacttacactgtcatagtctagagacatgacagttctttccacatttattgtttggaaaggtgggctatggttttcagggtccaagtgtaagcttctcaaggaattagacaaggcaaagatgaggaaattttctgttgaaatggcacaattcttgccatcactttgcagggtcccaaaggcacagtcacattttggggtgtgcaatccaggcagagcaaagcagagatgagagcacccaccattgttttccaagcaagggttgttgttgacctctgctggtgaccggggctggacttgcttgtcaaagatggtcacatctcttagccagttgatattgtctcttatcactgtgggtggctctgtgttctctggttccttgctggcttggaagatctttttcaaattcctatctacccatatgatagaattttcaaaaacagtgatgccataaggagttgggtaacgactgccataacgaatcacttcagagttctctccattgatacgaatccttgcaattatatctaaagaatcatcaacccaataaacgtagccatcacttcggtccactgccaagccccgtggtgtgacaatgccctctgacacaagcactgttcgattggtacagtcaaggaaagaacgctcaatctttggtctctgcccatagtcagcccagaagaggtatctgttcttgggatctacaacaatatgcctaggcatgtccactgtgactttaagaagaacacggcggtaagtagtattgatccgcagaacttctatcagtgtttcagaaacaaaggcattggtgaaataaagatttcctatgggaaaaatgaaagtgcatgctgatcaatggagaaccaagaagaaaaaaagggagaactttacaaattcagaacaaaatatataaggttgaagtctgggtcactatatgttgtcttttccaagatgatagtgtcccagtctaggcttagaaaaataagttcttactcctaggaattatagagattgtgtcttcaaatttagagagaaagtgcctatcttcagcttctaaagtagattagaattcatagcaacatcataacccactttctactgaaaggtatattttccagaatgtccctccttttctatctgaagctctaaatgcttaatacctacttgaaacactctaaatatacattttcatagcacaacttccatcccaatgtgataaaagtagcaaagagggagcaccagcagcatctcaggttgttattaatgttatcaaatggtctttgaacttaaggttaacatgaagtttttccttagtctttctaactaatgtaggtgttttcatcccatggaccttctaaaagtgaccaaaagtccatttccctttgggccttatgtacatgctagaataaaaagataactttatgaagatagtataataagtagagaatgaccacaaattattgatttcatgtagttgaaagtctgttgttgaactatcaatgctactaccaagacacacatattttgttcctatatctgattcaaaccacctctagagaaatcaggccaatgtgaaatatgttactgatacattttttcattacctaactctacttgctatgtatgcatttgctcatttccaatcctttaatccagggttggcaaactttttctgtaaagggccacataataaatattttaggctttgcagagcatatggtttcacaagtactcaacactgccactgtaacatgaaagcagccatagacaatacacaaataaatgggcatagctgtgttacaataaaactttatttacaaaaacaggcaacaggctgcatttgacgcacgggccatagtttgctgactactgctttatctataccctcagaaatagtaatttctattcaggaacgggagttaggaacccaattaaagctttatttaaccatacttccatatttactttttgcaataaactcttattatagtacttagattttcataatacatgcttatatttcctttttttaaatttttttttaattcgagacagagtctcagtctgtcacccaggcttgatggcagtggcttaatctcggcccactgcaacctccacctcccggcttcaagagattctcctgcctcaggctcctgagtagctgggattacaggcgtacgccaccatgcctggttaatttttgtgtttttagtagagatggggtttcaccatgttggtcaggctggtctcaaactcttgacctcaggtgatccgcctgcctcagcctcctaaagtgctgggattacaggcatgagccactgcgccctgcctacatgctaatatttctaagtgatgcctactcaccaagcttgattcaatgatactgattttatgtagaattggattatattccaaaacatataataccactaattatgagtggtatttttactcagatgagtgataaaaatgaggggttattcaagcttatgtgcatgaataaatacaactaagttaatataatactggaccaggcatttaaaaaaattactaataaaatatctcatgatctaagggatttttatatatgaataaaaggaagcaattaagaatttggcaactaaaattgctcagcttcaaagcaaatgaatgctgttccatagtttatatttttatatctctttctcttgaaaatttagaaaatttctaatgcagaaatcaggtgcaaatctaagtgtaaaaaaaacaaatccacataatttaatattttagccacttttgtctccagattatgttaataacagaagaaaatgataaggattaatttgttataaatctgtaaactgaaacaccgtatcatttatcaaatagacacgtagcttaatctagattcaatgtatcttaaatggtcttaataattgtctagaaaaacaaacctgtagcacatggagttaggctaaactttctagcataaaataagatgacagagatgcaaacatattaaaatcaccatatagcttacatacctgctacccaatccactgcaataccccggactccattttctcctattccatgtgtcacaatgttcatcagagaagatccatctggtttaattctacggatcgcattatcagatgccactgagctgctaaaatcacaccaataaataaagccagaggacacatccacatccacatgcagtgcgtttcgtcctggaagttaagaaaagatcattaaaaaatgctgtcactgaaattagaacttttaaatgtctgcccttcctctcaaaccctcattcccaaccccctgctctgagcatctccccattacaaaatgaaacccttttttcccagttgcagtgagcagacccacatcttggtttctactctttcccacaataaggagctctggctcccgggagaaatgttgattataggtttaggcagggaaggtacgaagtgagtgtgaaacatcttattgtaccaagaaacaaggcatacacagaaatatacaggtcgccacttgaagaggttctccctggccaaaatggatccactaaaacatcaaaagaaggattacagtaattgactgtaacacactgaatttaaaaaataaaaatttgagcccataataataataaattatttaaaaagtaaaccggggagacacgaagagctttcctttatagaagaatattatctaacaaatgtaaagggaatgctaaaataagaaaatcaccattttgcaatcctcgattaaataatcatttcaaacaaggatcatccatggctgccaaaaccaatgggtaaaaggtgcttgggagccaagacattcacagggcctaagtgtgattgcatagattccaccaaaattaagaaggaaaaaaaatacagctttaaaaagcagcagtgtagcagtgaccaccttaaccaagtgatcaaactcaaatgccactaagagcagggcaagctgacattatgttcttcctaataagattctgtatcaactaacacagcataacctataaagtattattgctaaatgtatttaaccttgatctaatcaagcaattagacctaacttccatttcatgagaactgcagggtaaaaaatgaaagacagactaaatattcagacaaatcctcagtgtgggattctcaaagacaacaggtctgcctctttaaaacatcaatgtcatagcaaaaagctagaggcaactactccaaactggaagaaactaatgagatattcccagtgcagtgcatgaatcttgattagatcttggatggaacaaaacagctatatataaaatattgtgaggccaactggagaaatatgattatgaatatttcataatgccctttgaaactgtatgctaacatatgtaggggtaaagtggcatggtattaaaatttatttttaaaaggttcataaaaaatgaatgtgaatgcatatgcatgtacacacacacacatacaaattgagagctcaaatgtgaagaaatgttaacaactgttaaatcttggtaaagggtataaggatatttcctaaatctttcaacgtttctgtgtttgaacatttttttaatgaaaagctgggagaaaaaaactattgaatttgtcatatctgtacaagatgataacttagatccataactttttagatatggaaaaacaaagatgagtcatgggtccacgtgaacatgaccatcaggcaggaggacgtgtgggactggaagctctctgattcccttctccaggtgcatttctgtattttctgaccatctctacaaccccttcattgacttcatccttttttccttcctttctaccctctatttctctctttagcctgtgacattctcctagcgatgttagaaaactcttagttcctcttgtgctaaggtatacctaaaaaccttggctcatctaggaagcaagtgatcgtttcatacattcacagtatgtaagcacaaagtgctgcaaaaatatgattactaaagagggactgacactgtgaactcttttgcttcaattcaccaaatatatattaataaatcatatttgtggactatttcattaccatattaaatagtagtataccttctaccataaatctccattaataatcagaaatagggcacagttctttggaacaccaactctgtagtacttcttgcaaacccatcctacattctatattgctctgggcctgtggttcttagcgtgatccatgggccagcaccgtcagcatgccctgggagcttattaggagtgcagattctctggccctaccctagactacaaaatcagaaaaatctggggacgaggtctggagctgtgttggcgtgagccctccaggtgattctgagacacactaaagtttgaaaaacactttaggctgtgccagttgatttaaagggaaaggaaagcttcattatgcactgaatccacacatgaagaaatgttttcatggcaccagggatttcaacctggtgccagatgaagtcaaatcttacttatattggagttggcataccttggcctgccaccggcaccatggtttctgaatgatctgacaattccaagctaaagcctctgattgcagacagcattgaaacaacaatgaaagagttatatggagagcaggaccgattatcaggattgagtttaaatccagtggcacaggcgcaggaaaacaatcctcctggtacaggcaggcaaatctgctgacaggcattcatgttgttgctacagccatttgaggattcggcggcatctaaatgaaaacaaaatccatttgtaacttttgatcctagctactcgccaccccatctcaaatttctttaattgggtcaccaaataatttattctaaaaattaataaccaacatatagtagctgagttagcaatctaaaaacaacatcggagagactagagcttatacaataacacctaaaggtatgaaaccagtaacccaactattgtataatagttagagaatggggcttcacttgttttcttctacaaatcatgcgaggattagggaggtcagtatataaatctgctcataatttgcctatgaactggcacttaaaataatatgttcagttacatgatcaataatgtgattttttttaaatatatgaaataagatttaaagaatagtcctggaattaatggcattcccagtgacttggaagaaactggagactattattcaaagtgaagtaactcaggaatggaaaaccaaacatcgcatgttctcactggtatgtgggagctaagctatgaggacacaaaggcctaagaatgatacaatggactttggggacttgggggaagggtgggaggggggcgagggataaaagactacaaatagggtgcagtgtatattgctcaggtgatgggtgcaccaaaatctcacaaatcaccactaaagaacttactcatgtaaccaaacaccacctgtaccccaaaaacctatggaaaaataaaaaaaaaagaatattctttatagtaataaaaaattaatttctattgcatgtgtttctttcacatgcagttaaaaaaatacctagtgacaaacttaggttataggacaggaaacaaattgtttgatcatctttggctgaagacgaaagctataaaatacatcaaaaaataatacctgtatcataccactaatttaaaggggtaaatcagaaattagattatctttgaaaaaaatgttgaaataggcaacatccaaaagcattctttttaagactaaaaattccatcccattagcactttcccagcaggcatccaactcatatgccctgagcaccttttatgtgccaagcactattctaatcaccgagtattgagcagcaaacaagacagacaaaatgcctgcccgtacagaggttatattctaataagtaacacaaacaatagaaaacagggagttctatgaagtaaaagcaaagtaaggaattgaaagtaatgggaagagaaagggaataaacttactctgaagtcaatctggcctttcagatgccaaattagcccttggcacttaaccatgtttaagacttcattatcattttttaaatatttcaggtaacttcaatttgtatgcacgtgtatgtacgtgaaactgtgtgtgggtgtgtgcttacaaatgtgagttatgtgtgaatatgcattatacacccatgaatgtatttcagtgacaaatacttactgcgtctgtgataaacttgaagacccctcagatttggaacattatctctcaagactattttgttggccccagtggccttatcaactctttcaatgacctcatactgttcatcagtataataaaggaaagaatcatggactgcaattccccaggggtgggaaagctggtgtaccaggatcattcgatctgttccatccacgtttcctctttcaatctaaaggattggaattttcattagtttcatggattcatagtgaaaattttgaacatttaaacactaatattctcctaattataatgtctcacatttatacagccctctatcccttacagagatttttcacttctattttctgatttgatcatcacaacgacaccaagcagcaggtcaggaaaatgtcactgtgcccctttcattgataatgaagacggagctcacatgagtcagtcaaccttttcaggtggcacggtgaagaaaagggagctaaaccactagtccctgcatgtgatattctggtcaaggatatactcaaacatctaagcgtgggccattgcacaggagctgactcaccctgagtttaacaccttcactgacaatttctgtaatggagattggaaatatgcccccaaacaaccacagaggacagcaagacaggacagggccaaaaatggtgccattaaatttgaacagataacaagctttaatcaaaatagctttggtacactggaaaagaactacaagaataaagtccctaagggaaaatgacaagtagtcagcttcttctggaagaaaaatgaaatgtagatgtagctggtttaatttcactccaaaaacctgcctcaagtgcctgctctgtgccaggatctgggctgggtattggcgagagacacagtgtggctttactgccatggctgaaaagggagcccagcagttacaagagtggttatgctgatgaaactgatcaaagttctagaatttagaatataagaaacatgagcctggaggagagagtggagagagtggaggccaggaccagattagctgagcaacctcacagaagtgttgggagctactcctcagggcaaggctccaagctgagccgtgatccaacttgctgactgtggctttatgaagaaaacatgtctccaacatgaaagcaggcttcaccactgaaggccatgcctagtcaaggccagagagaggttgctcagaatggtggaggtggcagaaaagatctgggcatgagtgacaggctgaggatggattgcagcatttggtgatgattaaaccaggagagtgaaggagaaataagggaactacactaggagaaaggttggagagtcacaccactaacaagcacgtagatttagaagctgtgccctgtcagatgtgtgtacagaaaccataccatgtaacaagagcttcctcgtcattgcacacatgcacccaactctgcaaagtgttttcacacacatcatcacttctttttaatctccaaagcttaccaccattataggtccatattcggagtgaagttagtacttgttgaacaaacaatgaactgaaagccaaacctactgcacaatattatgaaaagcatcaatgtcaaggatctgaagtaactactgttaaatagcaaggaagggactagcatatattcagttcagcacccaaagcaatgcttcatcaataattattattgagcattgtctatgtgcttagccccagctcagtgaaggtgaaatcctatttcaatgagtgaacgagactttatagtttctgcttcttattgtagaatataatgaacccaaccttggagttgaaaatcaccactaaagaaagtttcgcatgtgcattaatcatgttaaaatattagagaagaatgtgtagctacgaggggatgctgagttcagaaccttgctacgtaaataaatagatacatacatacatacacacacacataggtagatacatagaatatacctatatcctatacagatatataaattctatattctatatataatagatatatattctgtattctataaatatatattctatattctataatatatattctatatctatatagatcatatatagaatctatatagatcatatatagaatctatatagattctatataccatatagtatagatacatactctatattttttatatatatattctctccatatatataggtatatgtatattctctataattggagaacccagagtactttcaaagaaaaacactgaaatcactaaaccatgaaagaaatggctctgaaatgacaagtaagaaatgacaaatggaattaatttatcttgaagaaaaaaaaacgttggtggggaaattaataaacattaccctatagggaactatgcacatactataaagaactggacttcagctaggggcgaggtacgtgcaagggagagaagttattgggagaaggggcaatgaaacactggtacaagttaccaagtaagattgttcaagaaccactgcctgacagctcagaacactcagcatcagctacaccagctcagcataaagaccaaaagactgaaagggtgctcataccactcctcttccagtgactgcccagtagagtttctgctcttcgatgtcaagagtgacacactccaggtgttcgaggttcccagtaaagagagttttcacagatgtgccatccatgttagcactggcgatcttggcaggaaccccactgtcagttccttggtctgaccagtacagcttcctacaaccatgaaaaacaccagcatgtaacaaaacagaaggtggatttgagtcagtgacataaatgacaatgtgtattacttgtcctcaagatgctcacaatacaatgggcaaaggctgaaaatcaatatctcgttgcatacaacgtggaggggtacttcaccagtgttctaccaatgtcggtatatttcctagctataactggagtagaggccacttaaaatggtgtctggaataagaagctagggtatcccactggcagctgaacttttagcatggtcaggtgtgtgggaagcttatgacaaggaagaaacctacatcaataatccctccatcttcagtacatagtgaaggccaaagctaatataaaaagctgccaagtacactccctgatcacttaccaggcctcatttaattattccccaaatcaccatctaccacaagaccggctacttaattacctaacctgatttctgtgatgaaaaatgcaaagaattttgaaaactgacacagaaaataggagaaataatgagtaacacttttctgtgagagtggaatctcattatcatgctgttatggggtaaggaagacttcttttttctttctatttcacagcgatcaggtacacatgaaccataattaccacacagcattgccaaatccatgatatatgaaaatgtattaaaatatattaagggctgttttccatttccactgaagatgtaagttctagacttgaacccaacttttaattccttttgattgcacctccttctatatcttcaacagacaattctcctacattcttttctgaaaagtccttaaaccccttcatttaaatagtctttattcacctacctcttccaccaccaaatcaatatacccgtcctttgaatttcatcttcaactctaaacttctccgcctctaagttctcaaactctgaaatgctctgcttcgaccaaaacctctcatttcttccttgctttaacttttcctattaaacttgttctttgcccttaagccctgcctgagctcccaaccctccagttcttctacacctggacatcatatgtaaccatttcaacaatattcttatttattcttttgggttcccattgtgtctaagctaatctccaaccctgggtttctgcccttttttttctttctcctctcccatttcagggtaccaagagtttcctggacatagcacaaaactttcgtgaattctgaattcactaaaaatctaagttccctaatctaagctgaggattctcatccctagcagactttatatcatgttccgcatattgactatttcaagtcattctacttcataaatttcgaattccttccccataactttcactctcaatcaattatttcttcatccttgatctttcatctgctgctaaagaatacactcaggtttctctattctgaaagacattttcctgttacattttgacctacaagtttatctttctctaactttccaatacaaaattcttaaaagagtattcacatttcctcatcctccttccattcttttaacttctactatctctattcaacatcctctcttgaatatcatcagagaccctgtaactgcctcagctctttattagtgatcatccacaaagatatttttctgcaacaactggttcaataacatttatcacaactttatcaagactttctcttcactgagaatccaagatattagatcctcaagtctctgtcttgtttctcctcctatgtcctctgacaaaattctaagctcttctaattgtctcccaacccaactgggttgctcttagtcacttgaacaaaccctcaattttctgtccctttgctcttgaccttccatccttcatatcgcctgatatatcttaaaagctagctctgcccagtgaaattctaggtatgctttaagatccagtccaaatgatatctcttccaccaagctgaaatgtcacctctttatagcactatcatcccaatttttttagcctctcttgtggctcttaatcttatatgaatctgggttattgttatttatacacaggccttatcctccttactaagccataaatccttaaggttgcaaattaggtctttaatctttgtatccaccctctgaactccccaccatggccccatgaaagagactgcctccacttgccaaaattaatgtcttcctcttctctctgggtaaataggtggactgcatgtccttccgtgcagttagctgtggccatgtgacccaattctagcttaaggagtgtgagcagaagtggcgtgcactacttgtaggcctggctcataaaaacctcccagcaaatttctgaacgttctttcctttactgctcgaaagatcttgatactcagaatgacctaggaagcctcctactgaagatggcagagcatccatcagcctgggtcctgaatgactacgtagagtagagcttcctcccatcttctgcccaaaccccactgcccatataaaagacaaaaaaatttctattttctttgagccattacatatttaggagtttatttgcttcaacagttagctatcttaactaacacaccacccaacaaaggtacacaatgcagaaatgtctgataaacgaaaaacaaataatgagtgagcctgagtttcaaaagtagaatttcgaacctaagacagtccttcttctagaaagaataactgaaaactagtacaagccagcaggcacagaatagaatgtttgcttcttgtgccctttaaaaattggatttggtttccatgtcatccttatttgaaacagagcgctaatacaaattacttcttcagtgcccttctaggcctaagaatctgataactttcaaacattaagccaaaatccacttggaatgatgctacaatctctttaaaaaaaaaatcagtgttcatattttacaatttgttattctggtttataatatggtatagtagatcaacagaatgaaatagccaatcaaacagaccggaggactccagcctacatccattaagaccattttctcctaactggtctccctggccctggcctctctccacatcaatcctgaccaatttttctaaaacacaaatttggttctttcactcccttcctcaggattccttgctaggaagagaaaaccaaataccacatgttctgacttataagtgggagctaaacattgagcacacatggacatacacatgggaacaacagacactgtggactactagagaggggaggaagggaggagggcatgggttgaaaaactaactattgggtactatgctcactatctgggtacaatatacccatgtaacaaacctgcacatgtgccccctataactaaaataaaagttgaaattttttaaaaaaaatccctacttgctccttatcactcaaaagaataaagttcaacttcttagcatgatattaaaggccctccttgatttgtccccaaatgaccttatctgttgtatctcccatgtggtcaacagctccctactctaagcctctggttccggctctccccacaatcctgctaagtgccgccatacttctgtgccttcatggatcccttggcctcaagagtcactgcctggttgcaacccattctccacctactagaaggcttctcatcctgcaagctctattgcaaatgttacataatcccttagagctttccgtgtcctttcaaagtcagaatatattgtcaattcttataatgctattttaaaattcctaaaattcttgcttgtttggaattaattttaaatccagtgttgttcatttgaagaccataggacaaaatacaaacaatatcctgcacattaaatataggtcagagctatttctctttctcactgagatctattatttttcaaatgttgacatatgaaatcagaagatgtcctaaatttgaaatcttccattttgtcagaccctgacattaacaagaacaatgctgcatggaagacacgtgccatttatgaatactcacccacgagcaggatcaacagttatgccaattggaaagccaactccaagagctgtcccatcattggcaatcaatgtttttctgtatctgatatctccgtggagtgtcaaaacctatagcataaaatcacttattagaactgactttcataaggggaaccaaaggaaactgagatgaaggagaacttatgtacaaaacaaattccaaagcacgattagggatggatgagagaggatttgcatgagattcagataatctatattgcacttcagggaaatgaggaaattagctcaatagaaaatgagagtaagagcagcaaaatcacctcccaagttcctacttccaactcacctaaaatttcaggagggaacatttttatggataaaaggaagattcagttgggaaaacatacagagccactgcctaaagaaactgcaaaaatccttcaggagagctaagagaaatctctggaagacaaatgagaaccccacagctttcctgcaccccaccaaggcactcggtggccagttactgccaacacagttgatcaaaatagtccaaatttactcagaggtacagtgaattctgttccaagtcaacaaactaaactgaaacacatgagctgaaatctctgccctgccaggtcctgactgtacaatctgaggcaaataaattcacctctttgaactttatcagtcaaatatggaaggtctgcgtagaccttacgggactaagagataatacaggtaaagcagcacaccacccagcacaactatgttcaataaacttctattgtttaattggtccatctgttggtcacttactatatatgaggtattagagcaagcattattgtattcgatcctcataaacaattctgtgaggtagatcccattatttttctcaatacagatggagaaaaagaggcctacagaggtttagtggctttcccaaggctgtctgtgattattactgttataatcacagtgttaacagggccctgatacagcacatagaaatatagtttattggactagaaagaagtttcttacagcaatgaagctattttaatacgtacctaagacagtctaacagacaattagtaagaaattagaaaatgtctgttgatttttgcattaaggtttttctataaaattgcttttcaatacaaatagattatttgtgtttctctgtctctcatacatgcgtgtgcacgtgtgtgcacgcattcacacgcacacatacacacacacacacatatatccttctttccctcattcttttctctaaatttttttctctgcctattgtctggtatctttcactcttgcttggactaaggtagcttttcttttctcggtttgcctctttctgctacaatctctctccttttcctaagactaaggatctctttggttcacagttccttttcttgctttctggaatatatagagctctctctcacacggccattctgtaggcttcactacaaaattcagctataaaatttcttttagtggatgggaacacagctacccctagtggataatagtttcttcaatgtttctcttattttcaagttggagttaaacacgaactactcttaggcaggaaggaatattatacaggtaaacagaaagtgaatacgattcctattttcttaattaatccaacaatcacctggaagacttacttacaatttaaatgacctaaggggaaacaccagttaaaccattaaaagggcagtttgcccttggatcattattctcacaggtctttcatggattttctaaaaatattgatcatttgagggaaacagcgctctgtatttacaggatacctcagtgttatgaagtacttttacttcctcagccataaactccactgtacagatgagaaaacaggctcagagaagttaagtaatttgtccaaggtcgaatagctcatgagtggagaaaatgcagtgttgtccccagtcataaaatgcatttccatgtttcagggtctttattcaactgtttttctctcctgggacaccttttccctacgtcttcatttggcagaaataaaaacagtcatccccctcatccatgggggacaaattccaagatcaccaatggatgcctgaaacctcagatagtactgaatgctatatatactatattttttcctacatatacacacctatgacaaagtttaatttataaattagacatggtaagagattaaccataatctgaaaatagaacaattataaaaatatactgtaataacaattatgtgaatgtggtctctctctctctcctcccttttaaatatcttattgtgctgtactcacatattctcaggccactgcaggtaactgaaacctcggaaagtgaaaccctccgataagcaaggatgtattagtcatctttcaagactcagctcacaagtaaccatgaatgggaaatctgcatgctctctcccctcacttatacctctgcctccaatcactagcactttatattcaccggccttatcacacttatgacactggagcacaggtatttgtttatgtatccatctcacagatatgtgagctacttaaagacagaaaaaaaatgtttattcatcttaggatatccaggatcaactgatccatagaaagcatttcctagtgctcattaaatgaatgaataaaatgagcaagcaacccagactcaaagccaggtctttggactccaaatcaaaatatctttcctctgtaccacactgcatcagggcataattagaaacttttggttcatgtggttaaagtggccttaccaatccatacacacatgcacgctcagttattctccaactggccactactgcattgtacctaacactaatgggaaagacacgttccctgcttttggaaaactatcagtttaaaagaagagaaccccatttactaatcaagagacaaagagataaaataagagcatattaattgccatttggaattaagacagctttgcactgggtggactttagagagatgtgagtttggtagtaagggtcttaggcagtagatgttgcctgtttaatgggaggatgatagtcttagttgaaatcatgaaaaatattttctgccactgtcaaagagggttaaaccagtctggattgccggagttgtagtttataaaagtgcaaagagagaatactgctcaggaattagagcagtgaagctgaccatttaagacatcttcttagcttctgtgggccttggtttctgatgtaaaaaaataaaaataaaaaaaagagtttgaaccagaggagcctccaaggggcccttcatgttaacacctgataattctacctggcttgagatacttgtgcacactgcaaatttccctctcatcacaaatggctaccagaactgcctgccctcaggaatgttgtgaggattaaattagatgctagtgaaagatctttgtaaactcaagcgctgttccagtgagagctcttttctctgcctgggacaccttttccctatttcttcatttggcagaaataaaaacagtcatctgcactcatccatgggggatacattccaagatcaccaagggatgcatgaaacctcagatagtaccgaactctacataggctgtgttcttagtctacagagagtgctttttagtatagataggtgctctaaattagccagcaggctgctgtgcgccttgctcatcttcagtatctttctgaatgctccagagaaaaaccgtcttgccagctggtgcccacctaaagcagtggattgtcagggctctgctaactatccccctccaaaaacttctccttgttttgggaagtttcactttcaaaattattgtgaattaataatcccttccatgttttacccttctctcagagtggagcaaaccaacactagtcaagttacctctgacttacttcatgtgatttcatacctgtgcctcatctagaatttcttctgggaattagagtaaaaagaacacttatcttgaagaagagagtatcaaaggaattagaatcaagtttctactttctgttttgctgttagaaaaactgtactggagccatagaaagatttccatctaagaacagaggcaaactataaatttggttgagaactgaaatagcattgaagattagatgaggaaacatagtaaaattctctgcttaccataatcttccctttatgttgaattccttatgcaacttttatttatcttcttatatattattttgtaaattacctaaaacacttttatagcaacaaggtagtattgataattaggaggaaacaaaatagagcaatagaaagctcaaataatttatttttgccagccaggcgtggtggctcatgcctataatcccaacactttgggaggtcaaggcgggtggatcacttgaggtcaggtgttcaagaccagcctggccaacatggtgaaaccccgtctctactaaaaatacaaaaaattaactaggcttggtggtgcacgcctgtaatcccagctactcgggtggctgagacaggagaattgcttgaacccaggagccagaggttgcagtgagccaaggtcttgccactgcactccagcctgggcgacagagtgagactttgtctaaaaaaaaaataaataaataaataaaaataaatttaaaaaaaattttaaggtggttttcctctttcacttcagagactttgatagttaacactaatatcttttccctttttctttttgcttaaaaatgattccaaaatccacgtgagatctattcctgagactagagtttacatcaatctaaatccaatgtttgtgtaagtagtattatggaatcattacctcgattgactgagttctaggattggtagaataaaggtttcttgaaatccaatctaaggccaggttcatagaaggccccaccatagatatagaagcaaatactgtcctgttggtgccatctgtcttcactctgtgaatttcaccctggaaagaaagacaaggggaggtgagcagttccaaggccatggctcctacaaaagaaccctttcttcactgtggctactgccagctgctgtatttcttgaacagtccttacactcagaggaaaggcaaacaaaggttcagcaccactgggtaggcttcaaacgatttttcagtgtgtcacaggaatacacaaggcttaccattcaggctatctccagtactggctacagagatagttcttaactaccacaagcatacaagtcatgagaaaaacccaagtcacagatgtggatcagaagaccaggagtatattttgtatataggtgacaaacatgaaacacaaagatttttcttctcttcctcctttatagtcttcttgctctttccctattcttacaggttttttccctgaaggctgaagaaaatgacctctgaggaagagaactggagaagtgttcattcttaccctagaggcaaatattctaaaggattctaaaggaaggccccagcaccacatcaaatgctttcactaaattcccttagggagctactacttttatcttgagttttgatcatttttatattcgtcgaatattttctactagcttaagactcctctaggggcaagcattgtgactgctgcttcttggcatgtattctgtggttagaagcaggtaattcagtgcagggcaaatcataggcacttctggaaaatacttgctgaatgagtaaataatacacaatagcttaaatttgtttcttattctgaagctaaagagtgttatgatttttgctccaggccaagctcacatatatacccctcattgaatcaaaaaacttagggataaatttatttccacattgtttcccttttactcacatgacaaaagtttgcttataagaaaacatcagtgcaggcaggctcttcaagaataaattatatactttgaatgttattcaaaacttactggattttcaacccaatagatgtattgctcagcatcatcaaattcaacatctaaaccattctgtatccctgctatggggaccatagcatcattgctcttcacctcaggattaagggagattccaaaaattatatgttgccttacagttattaagaaaggttgatcatctgtgaaaatagaagaatatcagtcaaaatcatatcccactattcccagacatttagagtaatggaaggcaatagcctgttaccatcatatgggctaaaatgacattgcagcattgcagcaataaatataatgtacttcatcagacaagcatgggcctttcccagggtttcagtgggctgctggaccacaagacctccaaccccacatacaacgctgtctggactttttcaaggcaggttggtatttatcttactcttcattaagtccttacttacactaataaaccacccatgtttgctaaacctcacagacaggaagttcttccacttctacacacagacaaacctcactcacactgatctcagggaaaggagagttgagttttgaaaaaaaaaaagtgaaaaaaatcattgagactattcttgtgaaaggcagcttactagttttaagaatgttccaaaaataaaacaacactacaaagtgttgcctagtatttattgagactttaataaataaatccaatgtataatcctatcagttgttacttgactagtgtctctcttccctataagattttaactcccaaaggtcaatgactgtgtctgatttgctcattattgtgtcccagggcctggtactcagagcctggcataaaatagttgcccaataaatgtttgataactaaatggatgaccatatgactgcattaatggatgaatgtataagtgaataagtaaacagtatcttccaaagttctcaaaactgtctacacattgtaatttaaacattcccataatatcttaaactatcagttcacttatctccttaatagataataaaagttcctttttcaaaaataatttaatctttatcctgatccccatcaagagtggggttttaaaattcctctctgagaaaaggaaaacttttgaatctaagttttgggttaagatatatgtataagatatatcacatattaagacaaagtatgaaatgattaatcattacacaactttcataagctaaaaatgatgttttcattatttttataatccgggaagctttccatcttcagcaggatgacttggtcattttttctttacttattttcacatctcattagctttttcttgttcctatcatttctattactgagaaataacccagtctttattaacctaggacaaatttaaatttagtctaatgtaaatttcgcaactattaatgctttacatttttcaagtactacaatgtagagtcttccacaacaagcctgcaaagttgttttcagctggagcaaatgagatttgcaggagctctgtgacttctgcaggaaacagtaataggagatggaccctggctcattcacttccaggcccttcttctctcagctgctccacattgcctctcttctgaacaactgcaattgcaataaaaatcgcttctcattgattgagaatatgcgccatactgcatgcatcaggtaagtatttcccttaatttatctccctcaagtttcctaatcttgtttgttagataggtcctccctcaatttgcaaataagacacaaagaaatcaagcaatttaaacgaggtcacacaaccaggactcctggactccaaaatctacgtttttcatcactacactgcaaataccgcaggccaggtactatttcttgagtatcaaattaccactcatttcatttggtttaactgcaacagtaaaaaaaaaaaaaaaaatgctagattatgagtttcagctgtaccaagaaattatattgagatgatatttaattatttattgattatctgttattaatgttcactggctcagtagaaactatctctgtcccagttttatgggggactttaaatttttactcacttacgtaagatctgatcctgcccttttgaatgggtcatctccctttgcttaattggaataattctcaaccaaagcattgtttagggcctaaaaactttgcatatctcatccattatgcatgggccttcttgactcttccatggtgctcttcccttaagcaccacccgcttctactgcttcctggggatcatgtctcaagccctttatctgataactgctgatgtactgagaacgtttaccaccaatgaacatttgcaagcaatggaccagagaacaggatctcctgcaatgctgcgctggctgaaactgtgagcatcatggtgggggatgatgccaggggagtaatagaaaggaactggccagtaagacaacaggtggcgcagggagatgcctgaaaagtgctatatgggaaagcaaaaagaagtgacttcacaacactgcacacatttctacggagcaaacgggtaaaaatcagaggactggggaagtaacaaaaatggatattggagagcttgtcattcactcaacatttactgagtgccaccatgtaccacgaagtgccacaggcaataagcatacatctacagaccaggtagaggctttatcctcaaggaacgcagcatctagagggcaagaccaagtatatgagcccttacaattatgacaatggcatgaaggggtaggcacagaatcatctagggttggatggaaaggaattcaggaggtggtgacggttaagtaggtcagtgtgtctctgtcttttgaagttaaagatcatctcttcatttctattttccatgtcataatcccattaatgttagtgtcagcagagtcatgaagacactatagtcaggaatgagaactcagtgttgtaattgaacgacaatatatatgacccccaaacctaggtcctccttaagtcataccctgcacaagctgatcagcactgcagccttccctggagcaaggacaaggagtgttctcttatcttgcacaaaatcactgaagcaagtgccttgtgcccctgagaccgagtcagaagtctatttgtatttggagtaattttaggggtgctgaggtgatgtttggcttgagttttgtttgttcatttggttttggcattgtggggaatatattttctaaagaatttaaaaagtctcatacagagaaagcactcattataacataaaattagaaataagtagaaccatctcataattcccctatccaactgtaaccactattggcacttgtgtgtttttgcttccagaaacttgtgtgttttttaatgcatgtttttacaaggccaatattgtgcaatatctgcttcttttacttaacagcatcacagaagcacttctacatatattccagcctcttagtaaacactagttgaaaagctattcaacaatcaaatcaagtaaaatgtttccacctataaatgttaacaagttttctaaacttcttgttggggaaaaaaaaatgtggaaaccttttttcatttaacatatattggcaatcagttactcagctggtgctctgaaacctactgggaaatacttaaaaagttccacttcggtaaagtcaacccatgagaaaaccactagtggaattatttgtgaaacaacaaaaggcactatttaaaattaacacttatcaatcatcatcagagagtaatattgattacaccaacccccaatgtgcaattcaacagtctttgtgtgctgaaagaatgctttgtatccgaaatgtctacagcccagtttaatcttctcctgaaagactctaggaacacactaaattaaacaatgtcaacgaggattaggtacataataagtctctgaggaaaaatggcaagtgccagtccctctgtgagaattaccaataattaaaatctttcatcatgaaagtatcattgcacaatattacatgctgatggaatttgattttcagtaagcctacatctgcataatatctaaacactaaaagtttcctgaattcagtatatattttccattctagattaggactaaatttccttctagattaggactctattatctcttaatttaggaatatgtgatcattaaacatttaagttgaacttgtctacagcaattttcatcagtatcaaaatatattcattcagttctcttcactgagaaacgaaagggaacttgggtttagagtaacttcttagatttttaagcaataaggaattatatttttaagtgtattatatacaagtacacactccagaagaaatctcttttgtgaactggatgcaacttttccttcttttcttactcccttaagtacttggtataatcctccacacactcttcaatcgacccaataaaatatctctaggatgagataaatattaaattgctcagtcacttgtaatatctcataccaacacaattctccttcttaaagtatcagatggtaatagtaacagtactgaaattggagtcagaagacccaggctagaacactcattaactattggttataagaataaaaatgagacaatggagccaggtgcagtggtccacgtctgtaatcccagcactttgggaggctaaggcaagtggatggcctgagggcagaacttggagaccagcctgggcaacatggcaaaacccggtctctacaaaaaatacaaaaattagccgggtgtggtggcgtgcacctatagtctcatctactcaggaggctgaggtgggagaatcacaggggcccggaaagtggaggctacagtgagctatgattacgccattgcactacagtctgggcatcagagcaagaccctgtctcagaaagaaaaaaaaaagaaagaaagaaaaaagaaaaaaaaaagagggagaaagagacaatggacataaaaaatgaagctgtacacaaacgttgagaatgtttacttcttaggtgaagaatttggaacttcccattatcatggcttgtcagagaagtctaactgtacccaggtgagagaaaatatgaggttacagattgttcaattacatgcacagataacattagttccatatacagaaactgtattacaaccaaggcacacagtgacatcaccccatacaacacacatcattctgcagacacctgaggaatcaaaggacacagcacatgttcagtcgcaattggttttagagtttccactgcttggcacaaactatgaccagctccatcttcagagctcacataaggagcatactatacctctcaagcaattcaggagatcaggagacagactccatcctgaaggacaaacacaggagtaaaaatgaggcccctgtgaggaaagcaggcagagatggctgcagcgggaaaaggcacatggattcacggctgcatgagaaagagaagaaagcaccagtaagtggaaaacctccacattaaaatcaaaacagagtcatgctcttagtgtccttccagaggccccagtacaggggggcttaagtacgttgttacctctgttgttttcttttgttttgttttcactgaactactcacactttcaacttccctagcatcaggctttcaacttagaattcataagagacacgagagaggagaatgactcaaggttacagatcaatccagtctataactggattacgaacaaacagccactgagtaatctggaacttgtaatagaaatatgatgccaaataatctgtctccttacctgacctaaaagagatctttttgcattaaaaaaaaaaaaagttgtgtgtttgatgtgtgaccttgtagtttacctagagttttccagattttggttagataataatcttttatttttctactgatgatatctctgtgtgtctctgcaccttgaaaatcaggattctgtgtggtccccacacacaggatgtttcctagatcctatacatttttattacacataccatgttattaatagattattaatccattcattcaccagaaaaatggtaggtattcactgtaaaccaaacaccattctaagcactggggacgctataaaagtggagtatatattcgagcaaaaagaaacaactaaactcagagagagagagagaggtttcagaacatgagggtaaagagcaaaagaattatgagggggtggctattttaggtagagcggtcaatgagggcctctctgagaaagtgacatttgggtagaatcctaaatagcacgcgaagcaactcatgcagagatctggaagagagatgttccaggtagagggaagagctagcgcagaagctgagaggcaggagtcgcctgctgtgcttttggaccataatgaaatccaatgtggcaacagcgagtgggagaagagagcagggaaatagcagcagccacatgctgaagggtgtgagaaacaattggagagttttgaggagagaggattaagtgaagattaagtgacttatctccctctcccaccagaaagaacagtacggatgccaagtctttcacctagacacccataccatgcactttaggacaactcgtgctggctacagcagagcacctagaaggcagtggtgccataataaactagtcctaaaagtaagctgctttcaatcagagtggtagcggtaagaggatcgaaggcactatctggtctgtactccatttgtcagctgaggaaacggagactcatgtgagggtcaaagaggtagcagccaaatgctgaaatgatataattcagatgtgctgttattatatcctaggtttgaaatttccatggtaaataaaagtaatggcaatgtcaggactagggaaagtatatagtggggtggtttgtaaagagaaaaggaaaatgtattgtccaaacaaatgggtctgtaacagtgtgcatttagcattcccagggtcagtgtttttcaagctactcccaggcaggatgtttctctgtatcactcacaatttggttgtttcgaaggatgaaccgcaacaatcccaaggggccattgaatattatacattacaactgactggttccctccatgccacttgttggctcgcataacccgacgagtagcacggtcagtccagtacacagagtcttcaaagagagttagggcataggggtgccgtataatctgtgaggcagaagagaacagtgagacctcatccaaaaatcaaagccaaggtgcactgagtcaaagaggatatctgctcaagaagacggtttcctttaacatgtcattatttaataaaaacacaaggaagtcattgtgcaaaagagcggcaaaaaatacacaattcgtcctatatcccactaaaccattcaagagcctttcacatacacgtgccatttactctttatgtttgccttggtaattacactgggcatctattttacaaatgaaaacaaaactgaagcacaaaaagcaaggtgatgtatccggatcacctactagttaaaagttagatggaactagagagcttagagactcctcatctcccactcccacgccccagccttcactccaccatcagcacacttgtgccggctatttccacggtcttgtgctgccactcactgattcacatcaatctgttatagtttagatgcatctttccttcaagtcacagcaactatacaatagcaattttttctcttttttaaattgtttttaattttttattttttattttactttaagttctgggatacatgtgcagaacgtgcaggtttgttacataggtatacatgtgccatggtggtttgctgcacccatcaacccatcatctaggttttaaccctcacatgcattagatatttgtcctaatgctctccctccccttgcccccacccactgacaggccccggtgtgtgatgttcccctccctgtgtccatgtgttctcattgttcaactctcacttatgagtgacaacatgaagtgtttggttttctgttcttgtgttagtttgctgaaaatgatggtttccagcttcatccatatccctgcaaaggacatgaactcattcttttttatggctgcatagtagtccatgatgtatatgtctatcattaatgggcatttgtgttagttccaagtctttgctattgtaaatagtgctgcaataacatatgagtgcatgtgtctttatagtagaatgatttatattcctttgggtatatacccagtaatgggattgctgggtcaaatggtatttctggttctagatccctgaggaattgccacactatcttccacaatggttgaactaatttacactcccaccaacagtgtaaaagcattcctatttttaatgggggtcaataacagctctttgataaaatatctattttctttattttcccatttaacttgtgaaaataaattcaacagaatttatagaataaaaaatgttatgtgaagaacaagactgagaaatataaatctagttaatttttgttttttttttttttgaaaacagggtctcactttgtcacccaggctggagtgcagtggcacaatcacagctcactacagccttgacctccctgggttcaggcaatcctcccacctcagcctcccaagtagttgggactataggcaaacacccccatgcccagctaatttttgtatttttttgtagaaatggggttttgccatgttacccaggctggtcttgaactcctgggctcaagcgatccaccaacctcagcctcccaaagtgctaggattacagatgtgagacaatgtgcctggccaagttaagttataaatttttgcttgaaaaaaattttttttttttttgagatggagtctcactctgtcacctaggctggagtgcagtgaggcaatctcagctcactgcaacctctgcttcccgggttcaagcaattttcctgtctcagcttcccgaatagctgagactataggtgtgtgctaccacactggctaatttttgtgtttttagtagagatgaggtttcaccatgttggccaggctggtctcaaactcctgacctcagatgatccacccacctcggcctcccaaagtgctgggatcacaggcgtgagccaccgcgcccggccacctgacacaatttttaaaggtatagaagcaacagattcacatctgcagctcaactaaatcacacgagctataaaaatccttcctggatatggcacaagctgaccatgaactggaatgaaaatattcattttccagttagtcatatgggatagactgcctctcactgttgctggtatttcctggattgatctgacaatgtctatgacacaaaaattaatttcttagcttttctgatactcgtctgatttctacctatccacgactgtagttttaatttggttttcctcaccaccaacttaccaaatcactggctatcacctgtctccgatggtgtccattataatcacaaaagtccatgtaatcaagataggagtccatgaagtagagcagtctgttggggtagtcaatagttaagccgcagggccagaagatcttgtcctggacaatgacagtgcgcatgctgccgtccatgctggctcgctcgatgcgagggtggtggccccagtcagaccagaacagtagatgctcactgggaaaggaaatgagttaccaattggaggggacgtatttaaatattaaaaataactgtcattttaaataatacaacatcctgtttatgccctgcttaaaataaatcatctctggttcagaatatattcacagagtttattgtttcctctaagtgtcacaaagtaaaactgtcataacacaatcacaacccatctgggtatttttataatgttcataaaacatgtaatacataatgtcataatgtagtacattatgacattgaaatgtctcaatgccaattcatgtttgtttataatccacaaatagttgatctagaaaaatccatctgtccttgtttgtctaccctgtcatgtttttagataaggaaatcaatttattcttcatcaggaattcatcataaatttcagtggtgtgtaatactttacaatatctaggaattcaacatcacattgaacataacttgcctaatttaccatcctgcagaaaagaatctaagttataaaatataagtaaattcagggaaagaaatcctcaaagatttccaaacacatgggagaatttctctatcttcccttcaggatcagcaggcaaaaactgccttccttatatgacttaaaagggagctctaataaacaacataaaactgaagcagaaaaatccagcttttttgttgtataatcatgagttatcaaagttacatcaaactggcccctctatggactattactgcatgcagtaattagaaacttaatttttaattatatgacatttcaaaaattgtattgccaagctaataaatcaatgtgctcttaaaataaagtaaacaatcaattgctcttatgtactttatgaagaggatgattcagatgaaggagagatagcaacacccagttggacacctaccatgtttaaacaagggatcattttaaattttgcatatcagcaacatgcatatcagctacatcatgttactgttgtttttccctcatcataaccatgtcaaggcaacataattttaaaaaaaagtcttacttcattctgggatctaatgctagtcctcttggatttgttaggtttttactaatcagcacagtcctgtggctcccatcaattttggagacttcaattgtttccagagcatagtctgtccagtaaagattacgacctacccaatctattgcaatagtttcagtcaagatgatgctactgtcaaatacctaaagacaaaagtgaataaagagtgaattctagagcaaataaatgaatgcaaacatggatattatataaaaatctagattaaaccatctaacttgtcctataattacttgtggggattagaaaattttgtctcctcatgtagctaaccaccaaatcaacagcagggttttctgagaaaagtatacaagattttgtcacactgaacattctaagatgacttcattgtttggttagtgcatagtttcgttttggtttcaaaagtttttgcaattaagaaaaagctctatccatttgcttagttggcaacattacaaaatgttatagtgtttgcatgcaacgaataatatctctattaattaaggaccaagaattacaaaataaagttgtaagaggcagaggaaatgtaactatcaggagccaagaaactgaaattctgggagatggattgagaaatatcactaaattaaagctaagaaaagcaaccccttaactttcctgcactttcctctgctctcatccacaagaaaagactgcaaaaggaaccgtaaagacattgtgaggtctctgcatcacctgacctggaattcagaatcacacatctgcattcagaggccaccctcctatctaaaacagccataaattcgtagttatgaacacgcaagtctcttgggtatgatgtggcccagaaggtaccatgagagctacccagatgaggtagggccttctctcactggtgaataacagcaaacagacccaagacagaggaactagccaggccaaaggtcaacagaaatgtacttaccactcttctgtccgttccattttgaaacgcactccaggttttaccctgagttgcatcagaccaaaagatacgaccactaattgaatcaaaatcaacagctacaatgtaagaaccattctcgaccaatgaatagatattgtggacctgggaggtgacactgtcggcaataattttgttctgacttgccacaagtaacagcagactctcagatgctgttcaagaaaaaaatgcaaaaatgtcaatgatactgggagaaaacacaaaacaactctttaaaacttttgattcaatacttttggtaacagaaagaaggtgtaattccaaactatagtaagttggtggggaggggaggaagccccatatgaatgattttaatcacttcattcttaaccttaatagttagctggttttcatgagtacttaaaatagactctttcttgggttatatttaactgtgtttctaaatactagtctagagtaaactatgcttacattcttccttttactgtatttatttttgtactttggttatcttccttactatttaataggttgtaggcttctggacagcaggaatcatgtcttaaatatttctgttttctgaggccctcagctatggtagagagttctaattctcccaacaccccctctcttctttttctttttagtaataaagcatgccaagttttagcttggcacagactctccagccagagacatttctctccctccactgaagtttggagtgaccacatgactaagttctgaccaataggatgtgagtagaaattacgaatcaaatctcaggtcacattctaaaaaggaagctgcttgccctccactttctctttccccttcctactttctaagagaagctaaaacctggagcattggaacccttgatgtaagccacatgatgaggataacagagcagaccccatgccctggactctctgacatccagactcctactacatgtaaaagaaagaaactttctgtttttgttttagcttcctctatttggtcactttgaaagtggtcaaatcaatatcctaatacatagtaaaaagcactttcttatagcagaaattgaattaatactggttgaattcaattaagcattatataaagatgcttaaatatagtatagaactcattttaaattatataaaagccatttggtattattttaaatactttaaaaatcattgacttgtatatgttttaacctctattttccaaaatacaccaggattttaatgtgtattaccccatttaatcctcacaaaaaattgaggtttaaagagattgcataatctttccaggattcaagtcgatctaactcctaatcaacattgtcaaatacctacatgtgccatttgattttaagctctgggatgtgctgataaactggctcgggttagttcagcaattacctgtaactttgcaagtcctcccatcactttctaacatgtagcctgtatcacacgagcaccggaaagaacctctcatattgtaacagtgctggctacaagagcctagaatatcacattcatctatgtcttcacaggtcttagaatcattggcaagtaagaatcccaatggacataggcatttagccccaaagggctcttgaacacactcgtgagtacaaccaccattgaaatctgagcagctgttcccatctagaaaaaagaaagagaataatgaaaaaagaaaatcaagaatctttgcttctttgattcactcttatgcaatatttattatgcagtctcatgccaccttcaatatgatgcccagacaagagctaagtgcagcatgcacttgggtgagttccacaggctgttcagggtttgctctaatttgtctgaggatttaccatccttcatatccattggagtatgatcaccttcttcactacaacccaatagtataactccatttaatgcaatgagaacccttgggaaaatattgttgacatcaaggaagaaaagtgtcattgatagagcatgcaaagacacttaaaattgtttctcgttttcttcctctgaaattctactatctatacagaaatggaagatagacaaacatttaagagaaaagaccagaaaatctatgaagtgaacaaatcaaaggggaaaggtcattgaaatattagagtacacagatccggtaacatatcgtcatgccttactttcagggccaaaatgaaaatgcctaaagccaccctaagacagttcacatgcctggggatgcaaatgccttctatttccatgtgtactctaacatatttgtaagagtcataacacagaacatgcgttagaaagggaagtaagttaatataatcaggacattttcagaacaaacacaacacatatgaaatcataagaatctgaaatacttcacaatcatacctggctggggttcatctgagagtgagcattgattaaagaggaaagaaagaaatgacagtaattaggattacatgccaatcacagcactttaatcacagcaacacaaatccctggacttcatttttttgtgataagttctgattgaaattagaaaatattaaagttagaaaaattaatgagcacattaccaacagaaccaaatttaatttgacaatctaatggcctcaatttagtctcattttttgaaacaaagacataaaaagaagtaaaaacacataaccaagtacaaaggatttaatcagaaaattatccaatggtgatgtatttgaattcaattatggttaccccctacacagatgtgaactcatagaggaactgaaatccttcctacaaagctacacagtgactgtgacaatggtgatgcacaccaggctactgttcagaatgagtttatggccagtaaactgtggtcaggaaacttactgcaaagtggggactcatctgtcccattggggcagtcaaagatgccatcacacactacactcagattcacacagatgttatggccaagacactgccattgccaactaggacagcgaaagggctgagtagggcagtccttctcatcactcatatccccgcagtcattgtcccgatcacagagccatgccctgtggatgcagtttccgttgtcacagtggaaatatgatgaagggcaagtcttggggacacaggcattgtgctcatcagatccatagaggcagtctggatgcccatcacattcccagaagttcgggatgcagataccatcttcttggcactgaaattcatctgagtggcacataccaggaggcctggttgctagaaggaaaacatggggtaaatcggcttgtgaatgtaatttgtgatcccttttatagtctagactcagaggaaatgattttggatccaatagtaggtttatagtaacaactatgaccaaattaatatttaaggctaaatgatatagagtcttctcccacactctagtacatagaaatatttctttgtggcagctagtggctctgacaacaaacgaagtacagaacgcacaactgctgactagcagatgagtacctgtgtcaaaagaacatcctgtttccttttcctgtgtttttaatgtacttccaattgcagattcaataataaagtttatctatctttctatgaaagaatcaccagaacattacaatagagcttaaatagctatgattactttgaacttcatgtgtttcatatcatgtttgggtgttattattttccctcagatgaactatacctaatgaaaccatcacacactaactaaagatgatggtaaatactcagttctttgcaaactttccactattcatcaagcaatcctggagagatacgtaagaactgcttccctatttgacaagggtaaaccaaaactctctaccagggatctcacaaggcaacagcaagccagcggcaattgacagtttaacctcagctcatcacagaattttatgtttttaatgtgaaacaggaaaattagtgattagtaatttctagatgttgtgcaaactataaagtatataagcattttatttaacttttctttttaatccatggctttacacactacctttctgacgcaggaggagaattcatgaaaacttacttttttggtctaaaacaccattgttcaaacaaatgatcaactcactgatgagtttttgcaagtctaaaatccatttaaaacaaaaagtgggcaaataacaaatcatgtgagtataggtttccagtctgtgaagattatagatccatcagaattatactgtatgaagtcctacttgaatcctccaactagaagaaatttcttttctctgaacctccatagaattttatctgtgccatttctaagacccttgtaactgtctatcttgcttaattgtctcttgccttctataatctccatagataacatcttagcagatattcaacacataatagcacaaagaatgaattcatcagagtcaatactaaacacagctccataccatttctacaccatgatatgacttctctactgaaacttaaaagaaaccagtaaaatatctttatatggagtagagcctcaaaagtttaaacctactaaagtgggaagtcctaagaaaaactaaaagtgaaaacaaaaatatctaagaaatatttagcccatctaagagactatttgaagtgtccatttatacaaccacttgatttgttaattacacattatatggcaatgtctactcaattttactgtatgttcaataccacattcctttgaggatactttcccccagtttgtctgagttagggaaaatgtgtggcaatatcaatatcaatactggcaaaaatgaaatgacccctttgtctgaaacattctgggtatgtgttacttacgacagcctgcttcatccgagttgtcactgcaatcaaaaacaccatcacaacgatttgtgacgccaatacatttatccccactggcacacttgaattgagaagcagtacagtttaatactaagaatgaaagagaaaagcattagaaattagctcagggctaaaatgactaaacactgagatttttcttttttgttgttatactttaagttctggagtacatatgcagaacatgcaggtttgttacataggtatacacgtgccatggtggtttgctgcacccatcaacccatcatctacattaggtatttctcctaatgccatcccttctctagctccccaccccccaacaggccccggtgtgtgatgttcccctccctgtgtccatgtgttaacactgagatttttctaaataaacattgtgaataaaaaagaaggcaatgcacttaccacaaccaacctcatcagatccatcaacacaatccttgtcaccatcacagacaaacgataggtcaatacatcgatgattggggcaattaaactgactaggttggcatgtctctgtcgaatctaatgtcatccgaaaacaaaaccaacaagtttatttcctgtgcaacaagtaccagagccaaactaaaaatggctaaatagctacagaagttatctcaattgtacatgggttcaaaattcttttgaatcagccacactatcaaagtcagctaagcaaaagaactcaaaactaggataggttttagaattgagaataaaaagattacagggcagagtcagaaactgtgattacaccttggaaaatagaccacattcagaaagtgagcatcatgtgcttggacttggactacatttcatgaatactatgaagtccatgactctagaccaaagccaagcaatggagcccaatcaggcaacaaaaccagcatgacccacatgcctagtagcaacagtgtgtagacagacccccaaaactggatttaaaagtctgaacagaacaattctaaaaaccagggtcctaccttactgttaagaccatagccttggagtcggatgcagtggctggccccacccacaacatgaaattatattaaatacacacttatagggtatgaaagctagaagggatcttaaagctcatctattccaaatgatagtgacttgcctagtcaggcaaccaggactagaacttagcccagggaactttgctccatcttaaactattattgaagacatgaaataaaacaacaagctaaaggaaagcagaactggcaagatggaaaacaggtggataagatcaaaggaaatttaaattttctgtgcctctttattttgatgtctttttgcttgtaccaaatgaaaaagaaacatcaatagccaaaggtctggatatatctatatgacttttagtattgttttaaatatataaatagatagctgagggattttcactttttcaattcctatctgaattgaaatgtttggcatcagaggcagtccttgctttgcttccatagaactcaatatttgtaggtggactctaagaatcccatgtgcaggcacgtgcctttgttcttgtaacctattgacacagagattgacaagtggaatagaagtactaaagagacaatgaaaattgcatgagccttagaggaaagaatgcaaggccatttggttgttgaagtctatttacgaggctgaccaaccaagggaaaccagctcaaaacttactgcagttcttttcatcagatccatccccacaatcattgtctgtgtcacagacccagttctttgagatacactggtgattatcacaggtgtattgggtgtcaaggcaggaagcaggtgcgtgggtggggcagttgtgctcatcactgccatccacacagtcgttgcgtttgtcacagcgccagtgtgcaggaatgcactccccatggccacaggtgaacgccgaagatgaacaggtattatctacaatagtaacaaactggtcatgaagacatttgtttttacagccttttaaatgagttcttgccttataaaggctcagttcaccttttttaatggaggcattgtatataataaggagaaatgttcatcaagtgatgtcatcatcactaacatcattattggctggcatttatttggtatttatcatagaaaaggcatttttctaagttatgcacccacacacatcatataagttctctttaaatcctcacaagaatactataaagtacatataattgtctgcattttacagataaggaaattgagtctttgagagatttaggaacctgcctatgattcacgctctggttggattcactctaaagctcatccttaactttcaagctgttacttcctccaaccacaatttcaaattcagactatagaaagcttgaaaatatgtcatatgaaaagtgcaaatagataaaatattaaggtaaaatgctgtgctcttagaaacaagaagataatacacaaaaagatgaaaatttaaaaaatttcagaaaaatgtacaagtgagcactttactcttgcaaatctgtcactcctctttctctccaaaagaaaggttattattagtattaacttcaccttgatagagatttctgagatttcaactgtcctctatcttttttttaatttgaatgtaatacttttgccttctgcaatagtgtttattaggccccaaactatatagactagattaccgtcaaaagaagaatataaaggttaagaccaccatttcattgttaatttattttactctaacatgggagaaaaggaatataacacatgagattttccaaaggctatgattgcaagtagttattctgtgatactattctctcggttgctaaatgttaggtctactttatttttggtttttgttgttgttgttgtttgtttgcttatttttttgaggcagggcttcactctgttgcacaggctgaagtacacggcacagtcttggctaactgcagcctcaacctccccagctcaaacaactctcccacctcagcctcccaagtacaaatttttgtattttacaaattttgtgaaaatacaaaatacaaattagctgggtgtggtggcatgtgcctgtagtcctagctacttgtaattttgttttttttgtattttgtaattttgtattttgtaatagtcccagctatttgtaattttatatacatatttttttctgagctcatctatttcttttttatttatttattattattatactttaagttttagggtacatgtgcacaatgtgcaggttagttacatatgtatacatgtgccattttatattttttgtagagaccggatttcgtcatgtttcccaggctggtctcaaacttctggacttaagcaatcctcctgtctcggcctccgattacaggcatgagccaccttgcctggtcagatctagtttatttcgatttgactttttgaggagtttgccaagacataatgactgcattggtccaaacagccaatgtcaaggaaaaaaattgttgaagatagtctaaatcaaggccagaaaccatccataacattatgaatgaaatttcttgcttagcttcctaaaagccttcaaagtgcatgttaagaatctgaaattctaaaagatatttttcccatataaatagcccaagcttttatttattttctttaaagcccacctctactctattcatcccaggaaatatcgccagtgcatagctacttactaagtgtgccacatagttgctcatcactgttatcatgacaatcatcgactccatcacagagatagtaattgggcacacatctgccatttttacaggggaaggaaaataagccacactgctctgtgggtggttcattggttgggtccccctcgcatgtcaagtgattggaagccagcctcattccataagggcacccacacactcgctggaaatttggcaccgggaagcagaagtggctgcagtcaccgttaggatgcgtgggttgattacaggcgttagaacctgcaaaagcaaagccccgagggagtcagtcatgtacattttcactaggtaggtcacgggtttgatttgtgaaggaaaacaaacaggacaaaacatttttcagacccaatactaaaaagtagcttcctcttggaaatcaacccgccaaatacaacattccatttaggtatggaaaagtcccaaaatgtgtttttcctgacaacatgtttaaggctagcagcattgaacagagatttcaagtcttacactcttagattatgtgaacgacaagaatataaaactaccaggagctagacctttaagtaataagtacttaaagagaacaggagccactgtaacaaataaataaacccatacaaaaaaataaaaaaaactgggcaatctcactcaccagtctggatgttgacatcatacgatttcaaatgcagtatgtaagcaatgccacttcggataactgtcatttctccaccatctgctttcctgactcgaataatggcacccagtctccagtcagtaaaaaataaatgctctgaaaagaaacatgggtagattagtattttcagtcacagctaacttataaataaatcacttgagaaaatgcaataggcttgaaatgcttcttgcaagtacgatcatctcccccataaatatctgtaatatgtttctctaaccattttccacgacttgttactccctagtaatgctctgtggaagtctgtatgttaataatatcagggttcaggttcaggcaagcacatatggagttttatgatggcatttagtagcaattggatttagttctgcataggtaatagtgaaaataagaattggggaattcttctacagagcattaaatgaggcctcataggtctgcacccgctaaagcactcacctgctgagtgctcttaggcaaatactacgctgtgtgaaggagacagtctgaatcattcctgagatccttcccaggtcaaacagttcatattctatgttttaatgacagcgcttaaattgtaatttttttcccttgacttaaataagaagctgttgagaaggaaaagtacaggtctagcccaaaaaaggaactttcagtgtatgtttgaggatcaataaaaatctcaacacaagtgtggattcacctacaaccacactactaatgttagaatgatgctcacaatggtaagagagaggcgacataagattctaaacaacaaaaatttaatcatgttcactttacactaactattgcagcaggaaaataaacatatatttttaaaagaaagaattgcatcaatgtggattttctctttaatgatagtttaactagaaaaccctaattaatcagaaaatgtttaagatgtcataaattttatttgaccaatttccttatctgtggtctaatcaatgaccaatcagtcattggactccctaaatctttctagagcctggcaatcccagtcccactactaacaaaggcatcctcatatacttaaataagtaaggagttcaataaatcttttagttctgtgtggtgcacaatcaagaagatctagccctttagtaaaaaggtacacaatttctatggtgttgcacaacaaaagaactttccaaaagaaattcacaaaaaacagcaatgttgaggggaggagccaagatggccgaataggaacagctccggtctacagctcccagcgtgagcgacgcagaagacggtgatttctgcatttccatctgaggtaccgggttcatctcactagggagtgccagacagtgggcgcaggccagtgtgtgtgcgcaccgtgcgcgagccgaagcagagcgaggcattgcctcacctgggaagcgcaaggggtcagggagttccctttccgagtcaaagaaaggggtgacggtcgcacctggaaaatcgggtcactcccacccgaatattgcgcttttcagaccggcttaagaaacggcgcaccacgagactatatcccacacctggctcggagggtcctacgcccacggaatctcgctgattgctagcacagcagtctgagatcaaactgcaaggcggcaacgaggctgggggaggggcgcccgccattgcccaggcttgcttaggtaaacaaagcagccgggaagctcgaactgggtggagcccaccacagctcaaggaggcctgcctgcctctgtaggctccacctctgggggcagggcacagacaaacaaaaagacagcagtaacctctgcagacttaagtgtccctgtctgacagctttgaagagagcagtggttctcccagcacgcagctggagatctgagaacgggcagacagactgcctcctcaagtgggtccctgactcctgacccccgagcagcctaactgggaggcaccccccagcaggggcacactgacacctcacacggcagggtattccaacagacctgcagctgagggtcctgtctgttagaaggaaaactaacaaccagaaaggacatctacaccgaaaacccatctgtacatcaccatcatcaaagaccaaaagtagataaaaccacaaagatggggaaaaaacagaacagaaaaactggaaactctaaaacgcagagcgcctctcctcctccaaaggaacgcagttcctcaccaggaacagaacaaagctggatggagaatgattttgacgagctgagagaagaaggcttcagacgatcaaattactctgagctacgggaggacattcaaaccaaaggcaaagaagttgaaaactttgaaaaaaatttagaagaatgtataactagaataaccaatacagagaagtgcttaaaggagctgatggagctgaaaaccaaggctcgagaactacgtgaagaatgcagaagcctcaggagccgatgtgatcaactggaagtaagggtatcagcaatggaagatgaaatgaatgaaatgaagcgagaagggaagtttagagaaaaaagaataaaaagaaatgagcaaagcctccaagaaatatgggactatgtgaaaagaccaaatctacgtctgattggtgtacctgaaagtgatgtggagaatggaaccaagttggaaaacactctgcaggatattatccaggagaacttccccaatctagcaaggcaggccaacgttcagattcaggaaatacagagaacgccacaaagatactcctcgagaagagcaactccaagacacataattgtcagattcaccaaagttgaaatgaaggaaaaaatgttaagggcagccagagagaaaggtcgggttaccctcaaaggaaagcccatcagactaacagcggatctcttggcagaaaccctacaagccagaagagagtgggggccaatattcaacattcttaaagaaaagaattttcaacccagaatttcatatccagccaaactaagcttcataagtgaaggagaaataaaatactttatagacaagcaaatgttgagagattttgtcaccaccaggcctgccctaaaagagctcctgaaggaagcactaaacatggaaaggaacaaccggtaccagccgctgcaaaatcatgccaaaatgtaaagaccatcgagactaggaagaaactgcatcaactaatgagcaaaatcaccagctaacatcataatgacaggatcaaattcacacataacaatattaactttaaatataaatggactaaattctgcaattaaaagacacagactggcaagttggataaagagtcaagacccatcagtgtgctgtattcaggaaacccatctcacgtgcagagacacacataggctcaaaataaaaggatggaggaagatctaccaagccaatggaaaacaaaaaaaggcaggggttgcaatcctagtctctgataaaacagactttaaaccaacaaagatcaaaagagacaaagaaggccattacataatggtaaagggatcaattcaacaagaggagctaactatcctaaatatttatgcacccaatacaggagcacccagattcataaagcaagtcctcagtgacctacaaagagtcttagactcccacacattaataatgggagactttaacaccccactgtcaacattagacagatcaacgagacagaaagtcaacaaggatacccaggaattgaactcagctctgcaccaagcagacctaatagacatctacagaactctccaccccaaatcaacagaatatacatttttttcagcaccacaccacacctgttccaaaattgaccacatagttggaagtaaagctctcctcagcaaatgtaaaagaacagaaattataacaaactatctctcagaccacagtgcaatcaaactagaactcaggattaagaatctcactcaaagccgctcaactacatggaaactgaacaacctgctcctgaatgactactgggtacataacgaaatgaaggcagaaataaagatgttctttgaaaccaacgagaacaaagacaccacataccagaatctctgggacgcattcaaagcagtgtgtagagggaaatttatagcactaaatgcctacaagagaaagcaggaaagatccaaaattgacaccctaacatcacaattaaaagaactagaaaagcaagagcaaacacattcaaaagctagcagaaggcaagaaataactaaaatcagagcagaactgaaggaaatagaggcacaaaaaacccttcaaaaaatcaatgaatccaggagctggttttttgaaaggatcaacaaaattgatagaccgctagcaagactaataaagaaagaagagagaagaatcaaatagacacaataaaaaatgataaaggggatatcaccaccgatcccacagaaatacaaactaccatcagagaatactacaaacacctcttcgcaaataaactagaaaatctagaagaaatggatacattcctcgacacatacactctcccaagactaaaccaggaagaagttgaatctctgaatagaccaataacaggctctgaaattgtggcaataatcaatagtttaccaaccaaaaagagtccaggaccagatggattcacagccgaattctaccagaggtacatggaggaactggtaccattccttctgaaactattccaatcaatagaaaaagagggaatcctccctaactcattttatgaggccagcatcattctgataccaaagccgggcagagacacaaccaaaaaagagaattttagaccaatatccttgatgaacattgatgcaaaaatcctcaataaaatactggcaaaccgaatccagcagcaaatcaaaaagcttatccaccatgatcaagtgggcttcatccctgggatgcaaggctggttcaatatacgcaaatcaataaatgtaatccagcatataaacagagccaaagacaaaaaccacatgattatctcaatagatgcagaaaaagcctttgacaaaattcaacaacccttcatgctaaaaactctcaataaattaggtattgatgggacgtatttcaaaataataagagctatctatgacaaacccacagccaatatcatactgaatgggcaaaaactggaagcattccctttgaaaaccggcacaagacagggatgccctctctcaccgctcctattcaacatagtgttggaagttctggccagggcaatcaggcaggagaaggaaataaagggtattcaattaggaaaagaggaagtcaaattgtccctgtttgcagacgacatgattgtttatctagaaaaccccatcgtctcagcccaaaatctccttaagctgataagcaacttcagcaaagtctcaggatacaaaatcaatgtacaaaaatcacaagcattcttatacaccaacaacagacaaacagagagccaaatcatgggtgaactcccattcacaattgcttcaaagagaataaaatacctaggaatccaacttacaagggatgtgaaggacctcttcaaggagaactacaaaccactgctcaaggaaataaaagaggagacaaacaaatggaagaacattccatgctcatgggtaggaagaatcaatatcgtgaaaatggccatactgcccaaggtaatttacagattcaatgccatccccatcaagctaccaatgactttcttcacagaattggaaaaaactactttaaagttcatatggaaccaaaaaagagcccgcattgccaagtcaatcctaagccaaaagaacaaagctggaggcatcacactacctgacttcaaactatactacaaggctacagtaaccaaaacagcatggtactggtaccaaaacagagatatagatcaatggaacagaacagagccctcagaaataatgccgcatatctacaactatctgatctttgacaaacctgagaaaaacaagcaatggggaaaggattccctatttaataaatggtgctgggaaaactggctagccatatgtagaaagctgaaactggatcccttccttacaccttatacaaaaatcaattcaagatggattaaagatttaaacgttaaacctaaaaccataaaaaccctagaagaaaacctaggcattaccattcaggacataggcgtgggcaaggacttcatgtccaaaacaccaaaagcaatggcaacaaaagacaaaattgacaaatgggatctaattaaactaaagagcttctgcacagcaaaagaaactaccatcagagtgaacaggcaacctacaacatgggagaaaattttcgcaacctactcatctgacaaagggctaatatccagaatctacaatgaactcaaacaaatttacaagaaaaaaacaaacaaccccatcaaaaagtgggtgaaggacatgaacagacacttctcaaaagaagacatttatgcagccaaaaaacacatgaagaaatgctcatcatcactggccatcagagaaatgcaaatcaaaaccactatgagatatcatctcacaccagttagaatggcaatcattaaaaagtcaggaaacaacaggtgctggagaggatgtggagaaataggaacacttttacactgttggtgggactgtaaactagttcaaccattgtggaagtcagtgtggcgattcctcagggatctagaactagaaataccatttgacccagccatcccattactgggtatatacccaaatgagtataaatcatgctgctataaagacacatgcacacgtatgtttattgtggcactattcacaatagcaaagacttggaaccaacccaaatgtccaacaatgatagactggattaagaaaacgtggcacatatacaccatggaatactatgcagccataaaaaatgatgagttcatatcctttgtagagacatggatgaaattggaaaccatcattctcagtaaactatcgcaagaacaaaaaaccaaacactgcatattctcactcataggtgggaattgaacaatgagatcacatggacacaggaaggggaatatcacactctggggactgtggtggggtcgggggaggggggagggatagcattgggagatatacctaatgctagatgacacattagtgggtgcagcgcaccagcatggcacatgtatacatatgtaactaacctgcacaatgtgcacatgtaccctaaaacttagagtataataaaaaaaaaaaaaaacagcaatgttgaaagaaataaataattattgctattttgggaatgttgtgttgtcctcatgggtatgcattcaaatttttttcatactgatgaaaccaaaagatactaaaactacattttctcgaatcccaaaacatcccagcccagagcagagaaaattcaactttttataatgtttctatgtgacagcaaatagcatgtgtctgacatcattagtgaaaagggagtaaatggatggcagcggcgggagggggacgggaggagtatttataattaactcatcaaaaatctcatgagcattttttaaataccacacactcctccacagataaacagacagcaggacaagatatgcaatatacttactaactattcattccacacatacattctatgcatgtgagaaagtctttgatttatagtgagtgtctagtcttttcaagcactgtgttaattattcaaagtaggaggtttcaaccagggacacaactagcatatacacagggcttttggtagacttaaacaaaacatgacccctctaactggagtaatcatggtttgtcaaacagacccaggatagatttcagtgtctcctcaccctcttggcctggcatttttatgcagtgcacaagctatacaaccattcacagagctcctgttttcaagactaagcaaaccacctgtttcatggtaccaggctacattcttattcccagaaactcaactcacagcagcatgcctgcactcaaatggggagctgagaagacaggcaagcactggctgtgctcattgtgactgtagttccccagaattcatgcttctcagcaatcttcactagtagcatgaaattatttggaaaggttgacgaaaaaaaattatgtcttgctgttcttcataaagcataacctaacacttccataaaacaaagacgatgtcagttctccaacattttgaataaaaaagtttcaaagtcattcagtcagcatatagttgatgaatatgtgtaatcgttttttccacaaggatttctaatgagattcttacaaacactggagaataatgaaatgctacaatgattactataaacagctcttgctgttttattcttgaaaatgaaggcagtaatttactgtttcctcacgtgatacttgtataactaagtacttgggatgttgaattgtataatacatgtaatctacaaagtgctgtacccatatacactgtcaacattatacgaatatatacaaaacaaaaatcacactctaaaaatgaaatacaccatcaacaaaccaaatgttttgtctaaatatatagcaccattttaaattttttcattttaaagtggccagcttttctgggattgtgaaaatgccacatgaggatgagtttactattgtaacttgcaatgtataaaaacaatacatacttttattgctttaaaacatacctccaaagatggcaagtccaaacggatgtgtcatctgctctatatggcccagtcttcttctgtctaaaccatcaaaggtgctgtgctcaattttatcaaaataggcatctacccagtacaatcgtgaagcactaaaataataaaatatttagttatctcttatccaaaaactatcagagcaccctttacacaaagggcatccaaaaacagtagggtcagttgacacatttattaaacaaagtttttaaaatttaaattatattcattaaaaatttaacagttttatgtcccccagaaagagacggctacttttcatgaagtggctttcaatcaattgtcttagaaaacttaaaatgttgctatctttgagccagaaattttattttctccttgtgaaatcaacaagttaagaaaaacagtggtagtaatctatgtttaaaaggtgaaatatatttcttccctttttttctcccataagttaccttggcatttcatctttataagcttatttactctattccttttcctatattcctagatagatcatcaatttcttgagaaccatagcttatacttttaaagtcctcccaaagtgcatgtaagcaaaggtgcatttgttgattaattgactccaaagatttcctaaactcaagatgttccctgtaagaaattacacactgcctacagttcaacaaatctgtaccctactttaaatgctgcttgggacccacctcccccatcttgagtttccactaaatcttgtcattcagctttctctagcaattttctcagaatactcatgaatttattagttttcaccccagcagtagctggccaactatgtttatgtcctttgtgttcttgttcaatatccttctcccatcaccaattaattatttaaaattccgcgagggcaagcagtaccagtttccttacaccatcatatcacccaacctgcctcattatgtgttctgcagtaaaagagaactaagtatcggggatgatgattcctacttacgcccaatcgatggccaagccattgggccatccaagagtagtgtttattacaggcaagaggtgagatccgtcactccatgctctcataattttagcaggacggaaccaatcagtgaagaatagatacctagaaaaagcagtagtaaattaaggctgttaacactgggacaaactacatgacttccagagatttagaacaaacagagattctccagatactgcaattaattttgttttctttatatgctattgaacttaacatacttagtgtataactcatgtaattctcagttaaaatttagttaacatgtaaccaaagtcacaaatacaaatggcatttaaatgggcattgagagaagagaaccactgtctcagagtttaggaactaaaactattgtcgcctaacatattctctaacaagacacaattcaggttacctattaaatattccacgttattaaaataaaataataaacaacgaacagagcaagaaaacatttcaatctctttctctctagattaaacattcaggatcctctagtcattcttccataaggaattgataaatttgcaggaaaccattcatctcagatgaagaaagcatccaaatcaatgcaatgcaaacagtatctgacccaagcatttttttaatattctaaagagtgggaaaaagataagtctagaggcaaaaaaaaacaaaaacaaaaaaaaaaaacacaaaaaaaacaaaagaaaataaaaaaacaactttttctcttttatgggatccagaggaatcaaaattattcttttccaaaatgtaactttctgaaatgtaactacttcatatcattttaaacaaaagagtcatcaggaaaggaattcaacagtttttcaaaaccaaaggccaaaagtttgagttaagacaaattcattaaaaaactaaactgtttaactctctatagggcaatgaaatttcttatcaataataacatcagttttaaaatgtgtttcttttattatcttacagagaggaaattaaagcagatactctagatgcagcaaacagacttttttaggcacacaggcattccagtcagacaggtctggaatttgaatactgactgttgcctaatagctgcgggccctttcacaagtcactttatctcactgcgccttagattcattctctctaaaatgggtatttacacatacctccttcacaaactagctttggaagctgatgagattatatatctaacggaagaacaggtatggatgttccctgggtaatcaggcattggtgggttagcagccatcttttttatcattccactcatatacaacacatagctcagatttgttctaaataaacacagtagctgttaaacatatttaaataagaaaagtaggaaccaaaaaggaatactgtgaactcttctgtctttccttgtctggcaccaccaattatagaatggtaaaacatgaaactttgtggtctgaaaaactttttattctgaaaactactgaatgattaagcaagttttgctaagctttatataaatatattaaagcagggaaagaatttgggtctttcctgttaattctgttgcctattcactccttttctactgaatctatatcacattgtttggtcctctgcaactgtgaaaaaaactactcttcagtgaagactgagaaagccaaaagttagaagaaatgttttgggtttaaaaacaattttttttactcccccagaataaagttttttggaggaaaaaagaaataaaatttaaggtgatttcaacttatacagttcaatcttatatttgctgaacttacctaaatccctagggcatcacttttcaatgactgtaaaagacatacagtttcaagctcttaggaaaacatgaacacacttacccggcaaaaggatgaactaccaccgaccgtgggttatttaaatactgaactactgtgcgtctcgttttatcagctagcctcatgacactgatactcttgtaatgagagtctgtccaatagagattctttgaaatccaatcaaaagccaaactttcaacattttccaccctgttagctgcgagaatttctcttcctataagttaaaatatggacatattttaagctaagtatattttgtaaggcatcaattttcctactaatgcacactgaaattttgtgtcagagttagagcatatttcaggaacacatgtggaattctttaaaaaaaaaaaaaaaaaaaaactctgtaagctgctgagcaataacatgagacaaacctagaatctatccattcctcaaactttggatctcaaagagtagatatgatactgacaaacagaaccaggaatggtatggcctggatttactcccatgtccaaccttccagaaaaaaatttctcactgtagaatatctgaagaagagatacctgagttcacctactaccacccggagacggctctgataagctgacaccaccaggtacgacctgagggtaaccctgaggtatcatcgcccaaccctctcatcaacagtcttccacagccacaaagttgccaagttttgaaaacaccagcagagataccagaaaggaaatcagaactgattaaaaacaacaacaacaaaaaaaaaaaaacgctttcctctttatggagttattatgctttcttttaccctcttttttctttttttcactaaagaaaatctgaatcagaataaacagccatacctctttcttttgcagtaggaagaaaaaatcctactactttttctcttcatttattcagcaaattgtgaaaagaaagttctctatgtgatagaaagccaactatatatttagaaaacacaatattgttagtagtgttaataatcacagcttagattaaatgagcacttactaggtggcagaaactggaccaagtattctacatggattcatccatcctcacagccactcaatcaagtaggcattagtatcgttcctattctacagatgagagaaccaagtcaaagagaagttaagcatctggaaagaagtgtggacaccaccctcaaggtaattcatagtgaggtggtgaaagaggaggaggcaactaggccaagagacaaaaataaaagagtaatgagtgctgagatggagagatgcataggatggtctgagagcacagattcctaatgggccacatggcaaagcagaggtctggggtggttgacagacacagagactgaaaactctacatgttctaggagtgtggctggaggttaatgagttaatgatagaggctaaaagagagggagatgttcatgatgaccaccaggtggggatggggcaccaaggaaggggtgagtggtcatgcccttcctctaaggcctgtgagaagttggatgaagcatccacttagacatgttggtttagaggtgattgtaggatatccaggtgacgtatccaaaaggcagctggcactatgggtctgaacctcagagagagaacttgcatagagatttttatcatgacctacagaaaggcttgcttggtctttccctcattccccagtttaggaggaaaaacactcagtaaatgcactattataaaagtctccccataattatttatagttgctacatagatagtaatcaaaggcaggaaaggtgtgaaattattcagagagaggaggaccaatgttgaacaacagatttacagttttttatagaacaggagaaaaagaaaagatctccagggtacactagaaaaaaaaaaatgatcaagaaatagaaggaaatccaggagtatgctgtcatggaagaaagaatatttgagagaagatggctgaagtaccaaatacaggactgataggcattatttaatttagcaagaaagggattagaggtgaccaggatgagaggggtgtcagccacctggtgggcagattgcaagaggtgagtaatcagtgagaaatgtggaagaagggataggaaagtgcaaaacaacctttcaagaaacttgaccatgaaatgcagagaaggggttatcactaaagaggaacatggagtgaagggtaagttgcatattttttaggatgggagaaacttgagcatatctgatgatagggaaaagtcagtagaaaaagagaatttggaaaaaagaaggtatcattgaaggagggagttctcctgagggcttcattcagctaatcctgacttttaatatgatttctttttctttttctttagagacaggtcttacctaggctggagtgcagtggcacagtcatagcccactgcagcctcaaacacctgacctcaagtgatcctcccaagtatctggcactacaccacaccaccacattagctaatttgatttctgacaactcatttcctgcatatactgtgtactcattcaaaaaaaaaaaaaagaacaatgtaatgcctccctcaacaaagcatacagagtttaaccactgactatgaggaatattttaaaaggtaggttgccaaaaagagtccaggaccagatggattcacagccgaattctaccagaggtacaaggaggaactggtaccattccttctgaaatgattccaatcaatagaaaaagagggaatcctccctaactcattttatgaggccagcatcatcctgataccaaagccaggcagagacacaaccaaaacagagcattttagaccaatatccttgatgaacattgatgcaaagatcctcaataaaatactggcaaaccgaatccagcagcacatcaaaaagcttatccaccatgatcaagtgggcttcatccctgggatgcaaggctggttcaatatacgcaaatcaataaatgtaatccagcatataaacagagccaaagacaaaaaccacatgattatctcaatagatgcagaaaaggcctttgacaaaagtcaacaacccttcatgctaaaaactctcaataaactaggtattgatggggcatatctcaaaataataagagctatctatgacaaacccacagccaatatcatactgaatgggcaaaaactggaagcattccctttgaaaactggcacaagacagggatgccctctctcaccactcctattcaacatagtgttggaaattctggccaggccaattaggcaggagaaggaaataaagggtattcaattaggaaaagaggaagtcaaattgtccctgtttgcagacgacatgatggtatatctagaaaaccccatcgtctcagcccaaaatctccttaagctgataagcaacttcagcaaagtctcaggatacaaaatcaatgtacaaaaatcacaagcattcttatacaccaataacagacaaacagagagccaaatcatgagtgaactcccattcacaattgcttcaaagagaataaaatacctaggaatccaacttacaagggatgtgaaggacctcttcaagaagaactacaaaccactgctcaatgaaataaaagaggatacaaacaaatggaagaacattccatgctcatgggtaggaagaatcaatatcgtgaaaatggccatactgcccaaggtaatttatagattcaatgccatccccatcaagctaccaatgactttcttcacagaattggaaaaaactactttaaagctcatatggaaccaaaaaagagcccgcatcgccaagtcaatcctaagccaaaagaacaaagctggaggcatcacactacctgacttcaaactatcctacaaggctatagtaagcaaaacagcatggtactggtaccaaaacacagatatagaccaatggaacagaacagagccctcagaaataacgccgtatatctacaactatctgatctttgacaaacctgagaaaaaaagcaatggggaaaggattccctatttaataaatggtgctgggaaaactggctagccatatgtagaaagctgaaactggatcccttccttacaccttatacaaatatcaattcaagatggcttaaagacttaaatattagacctaaaaccataaaaaccctagaagaaaacctaggcattaccattcaggacataggcatgggcaaagacttcatgtctaaaacaccaaaagcaatggcaacaaaagccaaaattgacaaatgggatctaattaaactaaagagcttctgcacagcaaaagaaactaccatcacagtgaacaggcaacccacaaaatgggagaaaatattcgcaacctactcatctgacaaagggctaatatccagaatctacaatgaactcaaacaaatttacaagaaaaaaacaaacaaccccatcaaaaagtgggcaaaggatatgaacagacacttctcaaaagaagacatttatgcagccaaaaaacacatgaaaaaatgctcaccatcactggccatcagagaaatgcaaatcaaaaccacaatgagataccatttcacaccagttagaatggcaatcattaaaaagtcaggaaacaacaggtgctggagaggatgtggagaaataggaacacttttacactgttggtgggactgtaaactagttcaaccattgtggaagtcagtgtggcgattcctcagggatctagaactagacataccatttgacccagccatcgcattactgggtatatacccagaggactataaatcatgctgctataaagacacatgcacacgtatgtttattgcggcactattcacaatagcaaagacttggaaccaacccaaatgtccaacaatgatagactggattaagaaaatgtggcacatatatgccatggaatactatgcagccataaaaaatgatgagttcatgtcctttgtagggacatggatgaaattggaaatcatcattctcagcaaactatcacaagaacaaaaaaccaaacactgcatattctcactcataggtgggaattgaacaatgagaacacatggacacaggaaggggaacatcacactctggggactgttgtggggtggcgcgggaggagggatagcattgggagatataactaatgctagatgacgagttagtgggtgcagcgcaccagcatggcacatgtatacatatgtaactaacctgcacattgtacacatgtaccctaaaacttaaagtataataataaataaataaataaaaataaaaaaattaaaaaaaggtaggttgctcagcatacgaacttgaagtttaccaaaaatactatgagaattccagatcaacaaaacagaaggaagctgacctgtggaggtgcctgtgggagacttggcctgcatgcagctagaaacccaatactaccttttcctgagaactaagctcgactgcagtgctccaagctcagtgggcctgattctaagtcctcaaaaaagataatttctcattcaaaatagcagattgacaaaccaaacatgtttatctcctcttcctccgaaattctacttaaaagacagtaaaataacagcagatgagtaattccaacaaatgtttgaaaagtaaggtattggaggagtgataactcagttaagaaggggaaaatgctacaaactaagtgtcaacagaagagagacacacccacatatgcagaagcctcagtgcactcacactcagaggcaccaggtcctaacaaaggcaggggcgaggaactaaggggctcagataaagcaagataaggagcaatccaatgcctaggtccctcccagatcctgagtgtcacgccactcctctatctcctctaagggaccacagattttctctggaggagctgaagcagaatggctatgggttcaaggcacagtcctcaacacagaactgagatggatgtggaactgagtacaggaggattataggaatactgaaagggcgccctcagctccctttcctctgcccactcccagaacagaccaccatctccccacatcttccccttaccccaagaaggagaatgaaggcatctatgaaggagaaattaatcacccccagaacagaccaccatcttcccacatcttccccttactccaagaaggagaatgaaggcatctatggaggagaaattaatcacccccagaacagaccaccatctccccacatcttccccttacctcatgaaggaaaatggaggcatctatgaaggagaaattgaccatctccagaaaagactcactaatgttgccttggggagcaatctggcaaccaagccaccttcctgcctgaagctcaccagctgacaaggcctatccacatgtacagacttttgggtcaggttttataacctcacccttaataccaaactagcaactcagacacttggaaaaagcttccatcaaaaagaagaaagttgaaaagaaatcaaaaggaaaaggaatccagagaaaatggaaacagaggaagattaatttttaatgtcatatccatatccatatcaaagtcatatccatagaaatggtactcagaatggcactggactcaacactagatattagacgtcactagagcaatgtcttcaaattccaggtttaaattaacttgcaacctgtacccagccaaacagtcaagatggagagcaaaataaaacactcacagacattcaaagactcaaaatatatgccacctacttatgtttctcaggaagctatcatgtaacttgtttcagcaaaatgaggaaataaatctagaaaaagaaataaatggcctgccacaaacagaagttccagcacaggggagtggcaaagagaagtctgtgcaccaggccagagaaaaacaagtcccaattggaacacaggataggggtctccagaaagaaaaaaaaaattatagattgttttctgtctttgtacaggcatttgatagagctattagagcatttggggaaaatacatgattgttatatttaaaaactaagcaaatgaaaatggggcaattgtcaaaaattgtcaagaaatgtcatcctagaatactaattggctgagcagtgaacaatatttatatttatattatgttaataatataaacacatatgattaatttaaccaaaaattataatctagctttttaaggagaatggggggagggaagtcagaagctgggagagaagaatgatgtaagaaagcaaaacgctcacctagaacaaggaagtaaatatcaaaaatgataaatcaagaaatagaagtataaacaaagcatttagaaacatggagacaaacaaaagaagaaatagtcaaaagagctgttccctccccagagcaggtctggattaggggcaggggagggtgggcaatatggttttatattgataacagataaaatgatatccaacatttactgaatatttactattttctagccattactctaggtgtttacatgcattagccaaaaattctctcaacaaccttatgagcaatatatgaaccgcatatttttcagactagaaaattgaggcaaaaggaaattgagtaacttccccaaagttacaaagctaggaaatgtgggaagctggaatttggaaccaggcagtgtagctcctaagctggctctcttagttggtatgttatattgcttacaaattttattactattacaaaccaaacccttggcatttacatagtccagcatccctgaagagatgtcttcccctttaatcaatctggctgcttgagtatgaaaaacagtgtctagtcaattaatctgttaatggctctcatacacgtgacatttcttttatgttaacattggtcattgttaaaatacacacacgtttgtaaccttttttttttttttttttttccgagatagggttgcactctgttgcccaagctggagtgcagtggtatggtcatagctcactgcaacctggatctcctgggctcaaacaatccttccattgcagcctcccaagtagtggggactacaggtacatgccaccacatctggctaatttttttctttttttggtacaagtggaatctcactatgttgctcaggctggtctcaaactcccggcctcaagcaatcctcccgtctcggttcccaaaaataacgtgtttctaaaataaaggaaaggtgtttgttttaccttaatccataaaaaagcaataaatttattttctcaatctaaaactatttaggaagcttagtaaaatctctgcttacataactatccaccccaaatcaacagagtatacattcctctcagcaccacatcgcacttattccaaaattgaccacatagttggaagtaaagcactcctcagcaaatgtaaaagaacagaaattataacaaactgtctctcagaccacaaggcaatcaaattagaactcaggatccagaaactcactcaaaaccactcaactacacggaaactgaacaacgtgctcctgaatgactactgggtaagcaacgaaatgaaggcagaaataaagacgttctgtgaaaccaatgagaccaaagacacaacacaccagaatctctgggacacatttgaagtagggtgtagaaggaaatttatagcactaaatgcccacaggagaaagcagtagagatctaaaactgacaccctaacatcacaattaaaagaactagagaagcgagagcaaacacattcaaaagctaacggaaggcaagaaataactaagatcatagcagaactgaaggagatagagacacaaaaaacccttcaaaaaatcaatgaatccaggagctggttttttgaaaaaatgaacaaaattgatagaccgctagcaagactaataaagaagaaaagagagaagaatcaactagacacaataaaaaatgataaaggggatatcaccacccatcccaaagaaatacaaactaccatcagagaatactgtaaatacctctatgcaaataaactagaaaatctagaagaaatagataaattcctggacacatacaccctcccaagactaaaccaggaagaagctgaatccctgaatagtccaataacaggttctgaaattgaggcaataattaatagcctaccaacccaaaaaatgtccaggaccagacggattcacagccgaattctaccagaggtacaaagaggagctggttccattccttctgaaactattccaatcaaagcaaaaagagggaatcatccctaattcattttatgaggccaacatcattctgataccaaagcctggcagagacacaacaaaaaaagagaattttagaccaatatccctgatgaacattgatgcaaaaatcctcaataaaatactggcaaaccgaatccaggatcacatcaaaaagcttatccaccatgatcaagtgggcttcatccctgtgatgcaatgctggttcagcatacacaaatcaataaacgtaatccagcatataaacagaaccaaagacaaaaaccacatgattatctcaatagatgcagaaaaggcctttgacaaaattcaacagcccttcatgctaaatcaataaactaggtattgatgggatgtatctcaaaataataagagctatttatgacaaacccacagccaatatcatactgaatggacaaaaactggaagcattccctttgaaaactggcacaaggcagggatgccctctctcgccactcctactcagcatagtgttggaagttctggccagggcaattagtcaggagaaggaaataaagggtattcaattaggaaaagaggaagtcaaattgtccctgtttgcagatgatatgactgtatatttagaaaaccccatcatctcagcccaatatctccttaagctgataagcaacttcagcaaagtctcaggatacaaaatcaatgtgcaaaaatcacaagcattcctatacaccaataacagacaaacagagagccaaatcatgagtgaactcccattcacaattgcttcaaagagaataaaatacctaggaatccaacttacaagggatgtgaaggacctcttcaaggagaactacaaaccactgctcagcaaaataaaagaggacacaaacaaatggaagaacaatccatgctcatggataggaagaatcaatattgtgaaaatggccatactgcccaaggtgatttatagattcaatgccatccccatcaagctaccaatgactttcttcacagaattggaaaaaactactttaaagttcatatggaaccaaaaaagagcctgcattgccaagacaatcctaagccaaaagaacaaagctgaaggcatcacactacctgacttcaagctatactacaaggctacagtaaccaaaacagcatggtactggtaccaaaacagagatatagaccaatggaacagaatagagtcctcagaaatgatatcacacatctacaaccatctgatctttgacaaacctgacaaaaacaagaaatggggaaaggattccctatttaataaatggtactgggaaaactggctagccatatttagaaagctgaaactggatcccttccttacaccttatacaaaaatcaattcaagatggattaaagatttaaatgttagacctaaagccataagaacccttagaagaaaacctagacaataccattcaggccataggtgtgggcaaggacttcatgactgcaacaccaaaagcaatggcaacaaaagccaaaattgacaaatgggatctaattagactaaagagcttctgcacagcaaaacaaactaccatcagagtgaacaggcaacctacagaataggagaaaatttttacaatctacccatcttacaaagggctaatatccagaatctacaaagaacttaaacaaatttacaagaaaaaatcaaacaaccccatcaaaaagtgggtgaaggatatgaacagacacttctcaaaaaaagacatttatggaggcaacagacacaagaaaaaatgctcatcatcactagccatcagagaaatgcaaatcaaaatcacaatgagataccatctcacaccagttagaatggcgatcattaaaaagtcaggaaacaacaggtgctggagaggatgtggagatataggaacacttttacactgttggagggactgtaaactagttcaaccattgtggaagacagtgtggagattcctcagggatctagaactagaaataacatttgacccagccatcccattactgggcatatacccaaaggattataaatcatgctgctataaagacacatgctcacgtatgtttattgcggcactattcacaacagcaaaaacttggaaccaacccaaatgttcatcaatgatagactggattaagaaaatgtgttacatatgcaccatggaatactatgcagccataaaaaaggatgagttcatgttctttacagggacatggatgaaattggaaatcatcattctcagcaaactattgcaaggacagaaaaccaaacaccacatgttctcactcacaggtgggaattgaacaatgagcacacatggacacaggatggggaacatcacacgccagggcctgtcgtggggtggggggagggggagggatagcattaggagatatacctaacataaatgacgagttaacgggtgcagcacaccaacatggcacatgtatacatatgtaacaaacctgcacgttgtgcacatgtaccctagaacttaaagtaaaatagtataaataaataaataaataaataaataaataaataagactgcttaaaaattagatactgagttttaattatcaagttgtaagtatcattacaataaacaggcaaaacacgcatacacacacacacacacacacaaacctttctcacctgtgccatcaatcttttgcttaaaaatcatgtgttttgacatatctgaaaaaaagatagtgctgtcctgggcgtcaaaatcaatcccgacaaagaaagaaggattccccgaaactggaaccatgacatcttcctgggtagacaaggtgaacgggatcccacgaatagcaacttgggatgaaaaaatgaggaaattctgaacagctgtaggaagaataacacagcacagtcagtcacagcatggttcttttctctcctcccaaattccagataaatgcatccacagagcaaactttaaattataaaatataattctgaaataaatgtaaaaataaatttttggaaagcatagttagaaataatacagggaagaaaaaaagataagcaactatgagggagatacaagtattagaatcttccttcttcctaagaaatgtatccttaaaatgtatttatatgaaaaatgatatccatatgcttaatttataaaataggagatacatctaatgtaatgacgagttaacgggtgcagcacaccaacatggcacatgtatacatatgtaacaaacctgcacattgtgcacatgtaccctagaacttaaagtaaaatagtataaataaataaaataaaaaggactgcttaaaaattagatactgagttttaattatcaagttataagtatcattacaataaacaggcaaaacatgcacacacacacacacacacacacacacacacacacacacacacagaaacctttctcacctgtgccatcaatcttttgtttaaaaatcatacagagctgaactctatagtaattccgtaacaatcctcaagttggtttaacttctgcatagagatctacaccaagaaccttacagtagataccaagataattaacagcaatcagaaatataaagatataaaggagtgaaagcagggaaggaaggggagggataaaggaaataggtaagaagaagtgatgtttaacagcaaagaggagactgtgacaggatgccagggagtcaagaagatgaaggaggtatgcccaagacaaagataaaaatcgcagtaacggaatttaaaagcaaaattattagacaacgcactattgatataatagttagaaatacatgttgtttttaatgagggtgatttttctgaatctaaaactacctaagaagttaacaaatgtgtctgggttagaataagataatttatatacgacgctagaaaccgcaacatctggagagcaagaatttgtcacaggcacagaaaggagaaatgtagaagtgaaaataagaaaaacaaatattgtaggagtgcatttcatcattagctggggcccaggcgatggcttaagtgtgaatagatgtgtaggaaaccaaagaggaagaaaggaaaccttcaaggtaagaatgaaatcaggaatatggaggcagatacaagaaagtttgaactgaaaggtgaaaaactgtgtgagtaactgagccaccccaatgctcaggagtttactttggaatacagagagaaaaaataagccagataagattcagatgtgattacctggttgaaaggggcatacgtggtggtctaggagaagtcaaagtggggagaagtacagtacttcccatcaaagttaaggctaacatctaaagtggaaaaggtatacatagcatagaaaagagctcaaagttcaaccatatggaatttcaagatcatagttaataggagaaaaaggcttcaggaaacaaagggggaagggaacccaagaaaaccttagatgtgggattaaagcaaaatcccaaaagacagaaatttacattttcaaacatagttctgtgtatagtagaagtggtgcctaccaaggaagatgccctgtgggctacagaaagcttatttgcagtcaagaagttagacagggagctggtccagttcaagagtagcagttagtctagttagaggtttggacacacatacacctgtgtcacctgccaacaacgtccaaaacagacttcttaccaatgcagtggcgctcatctgtatccagttggaagccgaatgtgcacttgcaacggaaacccaaaccatcattatctgttctgtggctgaggacacagacctgctcacagcccccattgttatctttacacggattggtagctggaaggaaaaatgcacagggttaaattgcaattagaaatgtgtaattatccaagacatgaagccacttctagcccttttcacctataggtgaaatagagtaatggattagcaacgtgttgaaaacattactactggttactactggatacatccacatctggctacactaaccctcccaatttcactgctgctctcccatccactctccaacagacggtggcaaaaaaaaagaaaggactcctacaactttctccccaataattatgtcagagtatgtctgctatcctccatgattagaaataattgtcaaaagaaaacccacacttcactgcttttttgccatttgtaggatataataaatattactcactggatgcttactttgtaagtaaaccaacttaaccaatagctctaagaggtaagtattagtcctccaattttacagaggagaaaccaagaatctaaacagttaaataacttgcccaacattattcagcagctaaacagcttgactaggattcaaagccagatctgattccaaaaccttaaatgtctgcaacacaaaccagtttatacttccaaaagccactctcaaagtagtgaccttaggaagagcactgccacagctagaaattttatatctgctttcaaaattgtctttttagcctttgacttattctttaaaatattctctttatcttctcaggtggattgatttggggaaacaataggcagatgtcattctgagccaaataatgaaaatagtaatttgagtgatcacattgatcattgatctaatggatctaatgtgagggcaggtgtgagtttagttgtgaattgagtgtaaaaactattcaaaacagatatttccaaaaatgttttcagataaaatatctatttttagacaagtttatactttcccaggatgatgacattgaaggagattcatctgaatgtgtcatttctagtggttgggcttttgttaagttaacctcattactttgcagtctttcttcatcctaaatagatccatcacttaacatgagttttagagcaaatctgttttcctctaaattattgctcaccaatattaagctttctaccaacgtagtgtagtttatgtttctttttctttgatccacaagcaaatacagaaaagagctatatacagtcctgatagacttatcaaagctcaagctataacctggaaacataaacaaagcttatgataggccaggtgcagtggcttacacctgtaatcccaacactttgggaagccggggcaggaggatcgcttgaagcccggagttccagaaaagtctggccaacatagtggaaatcccatctcagaaaaaataaaaagaaaaaatcacgtggtaaaataacaggagaagactaagcagtgtctgaatcaaaatatttctttttttaaaataagtgaccagccagagagacaccaaacccagttggcctatgacagattaatcagaaccaaagaacaggtgccatacatatgcaacagagaagaagaaaaaaatggctctgatgctaccgaaaatggacacttagacatgtcattttcttctatgggacctgtttccttaactgtaatattagaagtttgaaatagatgtctttcccagtagaatgaggataggtattttggtttggtttgtgagctgctatacccccaagcatctttgcaggtgctaataaacatctgttaaataaatctctaaattccctctagatttggcatttaactgtgaaatacatcagtttcttcagaatgctcctaacctgcagaaccagtttcagagagtttaacactctgggtaacccttcatatacttgagaatgccacccaaatcacataagacccctcattattaactttcaaagctttgagaaaacctttccaccaagtccggtaccaagcatggttaccactgctctgaggcttaccatagggctgtctgagggaatggtaaacagtcactccatagggcctcagggaagcctggtagtacacttgtgggttggtctctgtgaacttgtttgccttcagcacggccatctttgtccaatctgtaaagaacacctgaccttcaaataagcttactccaaagggatgaggaatgagggagcctccatgaactacagtcttcctgttataaaagacacatatatatcatacaatttgttagttttgctttattataattaaagctgtagttagttcaattaaatgcctgaaaagctaaataatttcttgtcacaaatacggaatagatagaaaagatacattttagatgtatacatatttccatctacatatgatagaaggattttcatgttgtctcttggaaaagacccttgagacttacattccagtcccagtcaatcctttagcttgtcctagacttttttggaatttactgtttccccttttgttcttcattccttttaggttgccccacatctaaaaggctaagatgtgaaatagcattttgaataccataagtgaaagagtataccaagactttggaagtctgggaaaagatgcctttgccaactatttcccactgcaccattgagcatttcctagcaattagggagcaggacagtgagtggtagggttcaagccccagcaaacgcccacatctgttcctgatgtcactgtaaggaaagcaagaagcaatgccactaccactcttatgcatctgcttgatggaactatcaactgatcatacttgtaatggaggcccaaagccacttaactgggaagaaaacagaagtaaaattaggcactaagcgaagagaggaaatcaacaacgccccccgtgactatgtctccataaacaatgattcagttagactcatgaacagagtgaggcagaggacggttgatatgggaaaactcttattttctttattttggcgtaatacaaagacctcaaagaaaaatcttagcatcccctgaaaactaaaaaggacaatagagctctaagaaaagacttgaagatattaaagctgggaaacacactaaaggggagtaaacaaagaaacctaaggtggcaggttagtgcacactttgaaacattctataatgacatggtacattaagattagagaatagtttctctctcagttagcaaattccaaaaccctgaatgccacctgctggcaaagcgagaggcaatgactttatgatttcagctgtacttgtgagctttaatatttctttgatgtttcttcacagccagcaaaccactcaaatctttttgaaattccattgatttttatcttttatgctttacttttttttacttcagcaaaagttagactatataatataatgctaaaacatcccaaagagaaaaaatttaagcaatttcacaattattttatgtgacttattgggttagctaattttttcataaaatttattcatattctccttatggaagccagtttcagtgataggaagtcaccatattaatacacaatacttcatttaaccaagcagagattgtcccaaggatatataatccaatggcaaactgtgatattatccttacaaaatggaaatacaagaggaaacaaaactataatattgctttcattgagaaaacaataaaatcaagtcattgggaaaaattaagttaaccagcctatttgctgaatccacaaagaataatattttgggtcaaaatttgaagaacatgttttacccaatttttgaaaataccaaaaggagaggatctaaaataattttttttacattaagttgtagttagctctaatcagagtaaaaagatgaaaaaaaatatgccatattcagccaggtgtagtggctcacatctgtaatcccaatactttgggaggctgaggcaggcgaataacttgaggttaggagtttgggaccagcctgggaaacacggtgaaattttatctctactaaaaatacaaaaattgccaggcatggtggtgtatgcttgtaatcctagctactggggaggttgaagcaggagaatcacttgaacttgggaggtggagtttgcagtgaaccgagattgcatcactgcacttcagcctgggtgacagagtgagactccatctcaaaaaaaaaaaaaaaaaaagaaagccatattctacattcaaatattgctgtttaagtatctttgtataccaggtaaaaatacaatacaaagaatttctccttgaaatttgaaatatataagagcagagtaaaatccaattaattcccagtaggcaacatcaaatacctaataaaacatgtatttattgggggaaggttagaaaattaaaagggaaagtgatcttgagaaacaaagcacaaatgaactcaggagtgaatgaaaataatgtgcatcatgtgggactaggggaagagttggagaggagaaatcaaagaacaaatgctggaggttatatttaatgagcgtttacctcttgtgttatgggacacaagaaaagttaacaaaatagagcaggtcacttcatgcaaatgtcagtacaaaggtcattaaagctatcatgtccaccaacaaagcaatattttaattctggtcctttgatatttctctgcagccattttatgcactttccctgcaacttataaagccataagccataaaaaatacttcttacctttgaattccatcataagttacagtttcaatgtaatcaaaccgagagtcaacccagtaaacacgcttcgatatcatatccagagttaccccagcaggccatcccagctttgttttcaccaagtctttacggttgctgccatccatgaatgccctttccagcttaggttccccagaaaggctctcccaatctgagaaaaataaataactacaaaagaaaaacagaagatgaaagaatctggtattttacaagttaacctgggaattttttttaacagtgtgtttggatcaatggaaattttatccagctgattagagaaccacagtataaaacaacagggaaattaagttgttttttttttttaaagagactgtgggggtcagtcaggagcatcaacagttccaaatagcaactattatgatgcactaatatggcagtctaaaagttcatattcagccagccaggcacagtggttcatgcctgtggtcctagcactttgggaggccaacatagaaggattgcttgaggcccatgtttcaagaccagcctgggcaacatggcaagaccccatctctacaaaaattaaaagattagctgggcatgatggcacttgcccatagtctcagctactcaggaagctgaggtgggaggattgcttgagcccagaagttcaagtctgcggcacgctgtgattgtgctgctgcactccagcctgggcaacagagcaagaacctgtctcaaaaaaaaaaaattcatattcaccttctgaactttctcctctgtttcctttatttgtcctttgcttctcttttttacacccaggaaaacttacaaataccttttaaaagaagctatcaagccattttgctcctcagttttccattctgaggcacagagaacatttccgtcattttcaaggaaggatagctgatataatgaagtagaactgaataatcatcattcacaaagactaaaatagcctaaagcttatccaagggtcctaagacccaattgtgaaattctaggagaaagctaagtctcctataacacttctcaaatgtgaagattgggaaatttaaatttaaacctgaagaaaagcattatcggtgttgctggattgattcagactgaacaacttgtaatgagatattagcattgatatctcaatcccagcctgtatcaagaaagttctgaaaggaatagttccaacctccatctttaaaaatctttacagctaattcatgttagagtaatcatcttaataataatgaagcataagtgatgtttagttgtaataatattattagattgagttagaacacaaaatccaatctcttagctaggaaaacgtggcaaacactaagaataaaattcatagccccaaaacaacaagtatttttagtacaccactaggtgtgtttgggtaacatgtcctcaaataggattatatttaataaactctcttaaagcttctataaataagggcacaaaatagacatggcttctagagtatacagcctaaaagaaatcagaatgagcctttgattaatccagtagatgttcagtgtatagagggagagagaaaattctaaaaatacaggaatcaatatgttttcacatcacttacccaacagttgggtccacggcaattcctctaggatgccccaagttttcagttataagggtaacccgatagcttccatccaaatttaccatatctatgcggttgaccttggtttccactagatagattttattattaacccagtccacagccaggttctctggggtttcaacagaaacattgagaacctcttggatatttaaaccattaatgtcaactgaaaaaacctgaaagaaaaaccaaaattattatatttcttcagcatcactaactacgtggtttgttttgattttttttagctataatcaaatcagaagtgctaaaaatctaaattctcaattttcagaaatttcatgcaagttatcatttaaataaatgagaatcgtattaatggtataataaaatgtaagaagaaataaataaaattccataactctttaagagtttctgaaatttatgtttcaaaaatctccattgcattactccaagatgaaattaaacccatcacactttccaaataagacagtgaaacaaaatttgggccattaaacaaaataccgtcaatatttgttactcgatcccgaattacagttccatttagaagatgcaggtaaaaatctgatttttatcatccagaaaagcagtgtgctttttacattttaaatgatcaaatttcaaaaattactaccaaatatctatccagttttgaaagaatgtctactatttcttttaattaggctcctggactccacttcgaataaaattaaaagttgctcaaggctaatccatataatagactgctttgtttaataggtcacatgtaatagtatagcatggaaaaggtgctgattaacataaaatatctcaagggccttttttgttagaaaacaaaggaactttcccctctactccctctaaaagtgaaaagctatcaacactttgtgctcagggttccattcagctactgaaatttctatttaccttattttgcacggtgtctgtccaaaaaactctttgcaggtgatagtggaaagccacacccacggccactccacgattctgagactccactaggatccggaagctccttccatgaatatcaccaattaacaaatcccgaccattggagaagataatggaggcctcgccaactaaatgcgaagaaggaaggcatcaccactccttcagatgagcaaggatggtgaagtagcttacaaatgatatgctttctgctttttcaaatgctatcttctaggttgtcttacctgattttaacataaacctctgaggcagacagatagctagcattctatccattttacagaagggcaaattgaggcacaaaaaggcttaatgaagcgtccaaaatctcagtaagttaggaagaatttggtaagaattcaagcattctggatgctagtccaatgcactttcaatgacactgaggagagtatttctcagatattttcgagactccttgatggtatgggcaccttagccccatgtgcaactttagattttgttaaacacagaagacattttaaagattaccaggaaatcactctgaaaaagatggtaatggtggttccaaatctgttctgtctgtttactcgcaggtatgcaaaatgatatatgaacaaggtattaattgcagtcttattggcaatagcaaaagataaggaatgatataaaaattgatcagtagaggactagttaaacaaattatgaacataaaagaaggaatattatgccattataaaaaaataattaaggccaggcgcagtggctcacacctgtaatcccagcactttgagggactgaggtaggcagatcacctgaagtcaggagttcgagatcagcctggccaacatggggaaaccctgtttctaccaaaaatacaaaaattagctgggcatggtggcgggggcctgtaatctcagctactcaggaggctgaggcaggagaatcgcttgaacccgagaggcggagattgcagtgaggcaagatcttgccattgcactccagcctgggcaacaagagcaagactccatctcaaaaataaataaataaggccggatgcggtggttcatgcctgtaatcccagcactttgggaggccaaggcaggtaaattatgaggtcaggagatcaagaccatcctggctaacatgatgaaaccccgtctctactaaaaatacaaaaattagctgggtgtggtggcagaagcctgtagtcccagctactcgggaggctgaggcagagaattgcctgaacccgggaggcggaggttgcagtgagccaagatggcgccactgcactccagcctgggcaacagagcgagactcattctcaaaaataaataaataaaaataaataaataaataaataaaataattaagaaataacttcatgtgctgaaatggaaagctctggaaaatatcttcagtacattcacaagatgcagaactgtgcatatagtttactaccatatatagatatgtaaatacagttaaatatctatatttgtatgttcttgtttattcattaaaaaatctctagaactaaaataaagaaacggcaattactcataggaaagagaaggtgaaaaccatgcagaggggaatagttatggaggaaggcatttcactacatatcttcttataatttaaaatttgtgaacatataaatatgttacctatgcaaaaataaacacattgaattgttaaaaatccgctgaacctaaaagttactacacagcaaatcaggtatttctacacaaaaacaagtagaaaatgggccattcttcagtcatgggagcagttaagtttcagaagacaccaaagacacttcaaaatcaagtgttaaataactattggaaaataggagtttatattgagaccttcgtccggagaaatcaacagcgacaaaatgctttggagccctcatctattttttgcagattttctccatgacttttctctactactctgtactactctctacttttcatactcttacactgattccaacaaattacccagagttagtgcattcaaaaaattgttaatccaaatttagcatgtccatttggaaatatccctaaattttgcaagaacactgtgaaaattatttctgtagatagttgtcgcctacttttgtggtaggtaattaattaaaagttaaatgtccaagccaatcaaatgtaggcatagcatttattccacaattaaaggtgggtgacatgatagcctaggcaaagtaaacaatcaatcaattaaaaaatattaataatggtcaccattagtcgacaaattggtccttaataatcaaagtatgaaattaatgttgaccaatttttctaggcagtaggagccatccctgatttgtaatgataaagccctgccaacaacaaaaatgctgataattctgttgtcatcagaaggaaggaaagaagctattagaatctgttcactgttcagagacacaggtgtccataatttactcacaggaatcattagctttgcaatactgtccacgctccaagatatacccttcttcacagtggcacaggtgacggccaggtcggctttcacacttctggtcacaaattccccatatctggcaatcatcaaactctgccatatggaaaatacacatttgtagtcaaggttatcagcatttattaagcactctctgacaaaaatcctagataagatggccaagaatgtggtgttgcccatgtctaaataaacaccctctggaattaggcacaggttctgagaatttataacaaccatcttcatgtaaggaaaaagaacatttacatcattttttaaacctacatgaaggataactttacagaaaatgcacaacacttcctgaattcatagccctatggtactgcatttcatttattaatgttagtctacaaatatataaattttggtgtaaatgtttcccttcaatactatgctttccaacatggcagccactaaccccctgtggctatctaaatgtatctttagattaattaaaataaaataaaattaataatttgctttcctagtcacttgccacatttcaagtgctcaatagccacatatgactagtggttacaatatgacagagtgaagatacacatttacatcactgcagaaagttctattggacagcactatttctgaataaagtaagacctgcctatagacagcccctcaggaagaaacaaatctatgactgcaataaagtacttggaaaggtctatttacccagctgtctttcctctgatgtcaaaaaattataaccaaaattaaattgaacttattttcaagacatcaaaaatgtcttctcctctacttattggttaacttattattcactcatttagtaagtgttcattgaagtcccttacatgacagagctctgttcattaccagagaagtcccagttctactgtttaaaaatagttccaatataattgacataaacaatagaatatggaggggagaacacaacaaaatattagaagagtctttcttaaagactataaggcttcaggggtgcagaaattggtacatctgactttccaagtccacgtccactctccatcatccttcaccctcctcgcttccctgggaggatgacctatacaaactataacaatagagttcccacaccctctggtttcaggaagttctcaagtagattataatttctgaaaccactgcactcccaagtctagaattctccagatttctatgatctgattacatttgcagcaactgtcagagttgtgaattgggttcaaccattcctgctgggtggcccaccattccataacccaccaaaaggccaagtttcttctcttttcttttctttttcttttttttcttttttttttttttttttttttttttgagatggagtcacagtctgttgcccaggctggagtgcagtggcacagtctcggctcactgcaacctccgcctcccgggttcaagtgatccttccacctcagcctaccgagtagctggaactacaggtgtgcgccaccacacctggctaatatttttgtatttttagtagagacggcatttccccatgttggccaggctggtctcaaactcctgatctcaagtaagcagcttgccttggcctcccaaagtgatgggactgcaggcgtaagccaccgcatccagccccaagaaggctcttctaatgatcccattttccctgcagattaaacataacaacatgagccagcatatctttctttccaaggaccgtgactaaccagaggaaaaaaaacccaatccgatctggacactaccaagtgaaatgccacatgagggtgtgaaatgccctcactgatgaatcccttctgtccccttaactcagccctgagaaagctccacctaaggctttgcctcagcaggaaaaaaagtacaggacattctccctcaaacccccagaatgtcataacttcattttgaatgcaagatccatgagaccacgtctaaggatctggagtcactctaagcagaagttctgatgtcaaacagaaggaaaccaaaggtggagaagtcataactaggaattctctagcacaaatgcccttcctatcacctgcactacaagtggtttaaagatttgaatgagtgggccaggcacagtggctcacgcctataatcccagcactttgggagggtaaggtgggaggattgcttgagtccaagggtttgagactagcctgggcaatatggcaagggtttatgtgtactaagaattaaaaaaaaaaaaaaaaaaattagccaggcatggaggcacgtgcctgtagtcccagctattcgggaggctgaagtgggaggctgcagtgagcgtgataatgccactgcactccagcctgggcgacagtgagaccctatcacaaaaaaacaggatttgaatgagtgtataaaattgctgtcacttttgtgacaataagattgtatccttggatcactatagaggaatatgaaggttaattaacatccatcagcagccagagtgaagacaagaaaaataaaagtagaattgagggttttcgtgagagtagaaaagatagtggaaaccacacaaaacactaaaacactactttacaatccccctctcactccaatacctttatctatttttctttcctttttattctttgtctcctcccaccaacaaatactgctgtgaaaatgactcaaaaacccctttttaactgagccccccttggccaccctctgatccatctggctgtgtgaaaccccaccatgctgaatgacctccctgccctcactctgcaccacgatgtcattctgtcaacaaacagcatgtcctgtcaatcagaaacaatgagcccagtaaactgcttcagcatgcctcagagcttccactgccaggtcaacactaccagaggcagatgaatggtagaaagacacaagatttcgtgtcaggattattcaatgttattcttgattaccaccgaggtattcactggggagccatgtctaagataataaatgttgcataggtttccaacacctgaagcctgtgtaatgcgtcagccatgcagagggttatagccatacagagagtatttgttgaaatgaaatgcttgagagagcaaaccaaagcaacaattcccctaaaaattcagctcagctgaaacaagtgtaactggtttcctaacgtcatgtatttaaagagttctctataaagagagaaaaatacagtcttctttgaaacaaatgtgaaataaatgttaacccagcctcaaaactcagaggcaaatgacacattcttgaaggacagcaaaggtcacagaaaaggtctctgcaggtggcaggaggcctcatattcacaaaggccctcaaatgtagacttttgagattatctccaaatgaggttgtctgtactaaagtcccagaaacgcgctggcgggaatgaaagaagatgtctgttgtggaacttaaaattagtgccccggtattagaacacactacttccaatgtgttattaattgtggtatcttctctgatcctgaaattatcctgtgcacacataatactgcaatattctgccttacattcactagtaggttaaatgcaaaattttataaaacaagaacattgttatgacagcctttcgctttgtgagaggctattgaaaattgaagtggcctgaatctctgacatttagaaaaccctagacatttggaaatacaacccaaggctcaccacagacttatatgttggaaaatatggaaaatgtgttatctgggctctagggtggaacaaaaaactgagaacagcttgtggggcatcacaagactgaattagcgattctgaaagaacaaatcacttttcctgaaaggacttcatggcctatcaagtttcaactgtaagacagctcagccccaactcctctttgggagttgataaaggaaaaagagagaaaagctgatgtaatactgagaatgtggcttctggtatttctattggaacttcttttctactaagagaaaaggaaaatgcctaaagaactaaaaggctgggaatgggattggcagctgggtagcagtgaggggggaaaaggagcctgacatttgctaaagacacaggagtggcctcacacccacagacgagccccactctgagcagaagtgaggctgcccctttgcgcagggctgcctgaaatccaggcagggctcccagagtcaggtcaccacctaaccaataagggcattcgtgtgaaaagtatctgtaaattacttgaatgcattcccaatataatggtaatgataacaataaaacacaaaatgtgtcctgcaatcttatttaagtccagttgcagatcataacttttatttataaaatgttttaaaatgattagaaatttgggggccttcttaaattattccagagttcacttaagtcacttgatcttaaagtaccttgttgaatatagttacttaagaggagcaattagatgggcaactttgggacgtggtcctgatattaagaacctacagttacccactatgaacacaaggaaaagctcaaatggattgctttactggatataaaaatctaattttttttggcatatggtaggtaagtgagcccaacgattgtagttttcagtaacgctgaggagcagactttctcaagaatttcaagtttaatttgcaaaccagagtttatttctggtatcaatacatttttctgtttgctagcacttccgctgaagaataataataataataataataaagaaaaaaagaaaggcttttctggctatgagtagttgttaagattagctgtatttgacaaagtataattatgttggaagcaatgagctgagactaaagactgaataactgcattaggtttatctatattcaataattttttccaaatgttaccaaatagttctaaaatattaaaattttaatattttaatattaaaattttaatattttaataatattaaaataataatttcagaagaaatacttttctagaagcatttcttacacatttcatgtttgttgctatcccaaaagccctaaagaatacctcacatttctaaggaatatcaaaagaatataaatatcctgggaaaattctgaatcattttggagccccatagatgactaccaaattttaatgaatagtttcaattgccttccagatgccttttcccaacagcagtaaaaatagttttctttaaactccctctgtgatcacttcctgctagtatgtttgttgttcatgtatcaaaaatcagatagaaggaaaaaagatcagagcaccaaaaactcactgagaaaacaaaaactgatgatagttggtcaagtctaattctcccatcataaggccccgtcctaatcacagtgagatataaagctggcatcaaaatcaaaaatctcattgggagaaatcatttctgaagtcagagaggagagatatgaggaaatagttggtgtactggtgtctagtttaatgccagccaccatctggaagcaccatgataaagaatctgctcatcttgaatgatagttccaagtggatgtcacaatcagtggaatgagtagccagcccagcaaaggcactggcccaccagtgtagtcacctgagcaatgacctggtgatcctctgctgtgtcaggtaacaactctttagttgtgggatcctggggatgcttgtgcatcctggagaagaggccaggggagcaaggtagcggtgcttgctgggctcaggcagcagctatctaccaacctcatggaagtagttcagtattcaataaccagtatggctgcaccaatcctgatgccaaatacttgaaaagaaaacagaaaaggactaccgccctcatcaagtaatggataggttccaggtagctagtcaactcgctcatgacagaaccattcttttgccttgtacaccacaccaaaccttctcagagttaaaattccctatttgccaggttttctgtgaggtctgggttgctctttgttatgacagaccatgacgactctccacaagtgcaacctcctagatgtcagagatcagggcacccatcagtgtactgtaatgaaagacaagtagccgccgccccccatcacttaccaacacaggtacggctgtcattgtggttgatgatataacctgggggacaaaaacacgctcctccatacggcgtctcatggcactggtactggcagttcaaggcagagcacagagtcatacctaaacgaagaaaagaactttgttaaatgaatggtgacctctggacaagactgattaatctaatagcttctttttccatgagtagcagctcagtaagcatgaagtagatgtacagaaaaatctgtcacccttcaaagcttactgcaaaactttgcaataaaagttcaactgagacaggaagattgcttgaagccaggagatcaagaccagcctgggtaatgtagctacacctcatattcacaaaaaattaaaaataaaagcattagccaggcacagtggctcacaactgtaatctcagcactttgggaggccaaggcaggaggatcacttgagcccaaaagatggaggctgcagtgagctatgactgcaccactgcactctagcctgggtgacagaacaagaggctgccttgagtggaaacaaaagaaaagaaaaagctcctttttaaagttataactatgtgcaagtataagtcattaaaagtcttatttatgaaaaaaaaatcaggtcatgcatgggtctatctttgtgtctacatagtaaaaagggctaagaactcccaagtgactggagcaagaataagccctagaaatattaactgtggctggcttcaagagatgggatttcaggtgattatatttttttcttttggttaatttttattttccaactttcatactgtgactacatatctcttattaatttttaagcttttttaaatgggctcccaaatgaaatagagaaaaaaatgccatagaggtctctgcctgtttaaatattatgtacaatttttgtcaggaaacaaaaaataaccttggggttgcagttacatgggcacttctaggcaatcacaaatttagttagagtatattattgatgaaatcaaggttttaaatggcatttccttacaggaccatcagctgtccacagagttgatgggttgttggtggggtgaatattctacagccccaaaaaaggagaaaaaaaatccctagttccagtcagtttcctcataaatgaatgtggtcacacaagacataatcgaacaacactgtgcatggccaactcagttttgccattggagagtaactcaaggtacataacccaggaaccagaagctttttttttttttttttttttttttttttagtacagccagacaaggcctttttccataagtataagccaggtaataaaatctccagaacatctttaaggtcatcaaaattgccattgaaacaatcctccctgtgtgtgcgttagggattaggaacggggagttgctaaaaaattgttaggctcttcccatcaatagatggagtctatttcttccatccactctgggtttggccaagtgtcttgctttggacaataagacttgagcaaacttggcataagtagaaccttgaaagtacttgagccctaggatttgctctttcagcctctgggtcaacaaggctaggctagcccaagcttttactgcaacatcctgacgtgtgagtgagctgatacaggccagaggaactacctagccaacccacagaactgtgagaaataagacacgtttctcagtttatgccactaagtcttggggtgctttgttatgcaaatgccaacagatacactgtatttgaacgtctgttctagaaaacagaaatatctttatctgaaagctacccaggtaaatgtctatactcactacagtattttccggtactagtgttgttttcatcttctcttcctgggcaatctaaaatcccatcacaaactttataaatggagatgcatcgtcccgactctgggcaagaccattctcttggggaacatttatgaacatcatgaggaccgctttctgtggggggaaaaagagagagttacaggccataggggaggtacagccagctctttgttaatcagtggtttacagaggatgtagagcaagttgaacaagagaaatctataaatgatctacattttacaataagttagtgatttctaactctaccactagtcttttactgagattctaaggagaggcataatggaattactccacttttcctggaaaaggcagcccccagtagggttataagaggaagaagcagatatgggcctcaattatcgacaaactaaattcatgatcccctaagaaaagatgtagttatttaaatcatgaattatagaattagggccatcaagttaggtccagaattacttgaatttgtggttgggctttttgatttgctttgtttatttagtgaaatgtcaacagtataagaaaaaccataacccaaatgtagaaaaaccactttctggaacataaaaacataaaacatagttttaacaagcatttcccttatcatacctgggattggaatggtgcaggtaacttgctgtagggtatgggtattagtaactgctaaattgttggaggtactgctgatgatatcagcaacataaaagggtcaatatcagcaacataaaagggtgaatatcactggcaatttccttctcacggaatctttaagcacttccctggatagtagcttctcctacacttaccatccccagctccaacccacgtgttcccaaggtggcctctctttcaccactgagtgtcagtgactcatttgggaatcagaatttacaaaaccaaaacaaaaaaataagctgaactgttaccaaggttcaaagtcatttttaaagattgtaaggtctaagacaaatgacattttccctattttctttccttccccagcctattagttttatatagttttaaatctatttaaaacaggcagtcttacagggagaaagtcagactggggtatagaagagacagagactgtcctacctattttgccttaaagatagaagggagaggattataatttaatctgtatttgtgttctgaatcttcttaggagaagttagcgcagtcacctccgtcttccccacccactaagttcctaaacaaccccttcaactccagccaatcctgaggcttgcttgtcacacaaaatttctaaaaaggaaaggagaaaaaacaagcgctggaaaacacttgaagaaaatgcttttcagtaggaatctcttcccctccttaccacatccatcttcatctccattatctttacagtcatcttctccatcacaaacccagttttgataaatgcatcggccactggggcaagtgaactggtaaccaccgcaggtcggatagtctggaataaagcaacagctgcactccaaagacacaaatcaccgggaaaaactgaaagtgctctcacctcactgcctaagcagtactcctagaaattgaaatttctatatcaatttaatcccttagacatcttgacaaaaatttttaaaaaggaggaaaaaaaagagagagaaagaagaagataacagcagctttgggtccaggaaatgaactcaggtgccggtttctgtttttcaagattaaaaattagatcagcctgggcaacatggtgagacctcatctctaccaaaaatacgaaaaataaaaataaatagccaagcatggtggtacatgtctgtagtctcagctactcaggaggctgaggtgggaggatggcatgagcctggtgggggtgtgtggagttgcagtgagccaagatcgcaccactgcactccagcctgggtgacagagtgagaccctgtctcaaaaaaaaaaaaaaaaaaaaaaaaaattaaaaacaagatggtttgcaatgcgttggcacagaacagaaaatgcagacaaagatgctgcagacatgacaacatccaacgttctcatactttactacaagctccgtaattgctaatctatgaccaaatgattctgagtcgaccattccatgatgtcacattctctttaattctctgtcactgaaataagcccaggttccagaaaggaagtcaggcatggctcattgaaaattagggtgatatcgaaaatatttaacaacaccctaaggcatgggtaccaaccaatcaaaagaggtgtggagggaaatcatacattctagtaaataaatcaccacgcaaagctgccaacttactgaacatagtaaaactctttcacagagtcttctaactttactctttccaaaaaacataagtggagaggtggcaacaataagagaggtcatttgcattgcaggcaacagcatggacataaaagcaaggtcagcgtgaagaagtggaggcaagaaagccacctataccacactgaaactttcaggctgggcgtggtggctcatacccataataccagcactttgggaggccgaggcgggcggatcacttgagatcaggagttcgagaccagcctggccaacacggtgaaaccccatctctactaaaaacacaaaattagccagacatggtggtgcatgcctgtgatcccagctattcgggaggctgaagcaggagaactgcttgaacccaggaggcggaagtggcagtaagccgagatcgcgccactgtactccagcccaggcaacaaagcaaaactccatctccaaaaaaagaaaacgaagaaaaagaaactttcctgaccctccaactttaatgcagcagaaatttcaaagtaaagaggagagttagagccactcctaggaacttcctttcccttaaaaacacttctctcattctactatcaaggttgtcagaggtatgggtcatttgagaatccagtgatacaatatatcctgtacccctggagcctaaggaaagaaggcaaactgtccatcaccagccctttacatctacacagatccttggaaaataaaggagcccaggtcgagcaacaccacaaaggcttgtgccaagaccccctagtgaccgtctgattccatctgccatcaaacgtagtgactcttctccttgaaaaaagaggtacattggtgggggagcggggggataaaacaaaacaaaaccgaaacaaaacaaaacactcccaacaacatgacccagcataaagaaatcaccgtactgcaagcatgttcgtcactgccgtcttggcaatcattgtcatggtcacagacataagcacgagggatacactctccattgccacatgaaaactcattgtgcaagcatatctcagctgcaacagaaagttaagaagggaaagaaaagagagaagttaactccattgtagccatttaatctcaaaggaagagcatctccagtttaaaaagggattcttattaagcagtggtgtgctggtaactgtttaagaaccagttatccaggaacaaaaaggccctggtttgtagtgtttgccgatttccagtgtgtaaatactcctaccaacggctgacttcaaactaccaacatgaattcactgaacctgaacttgggaagagatgtacatattggctctctcaaaccagtataaaccagcttcagcacacaactgcacatcttgtgcacaatacttactgcagttgatttcatctgaggagtccctgcaatcaactttccaatcacacttctgactggtgttatagcaggccccattgtcacaagtaagctgctcacatgttgggtactctattgtaaaaaaaaaaaaaaaaaaaaaaaggaaaaggaaacagtaaacaaaccttaaatttccttcagcaaacatttattgagtgattactatatgcaagtcactaaatgcatatattgatacacaaaagaagtatgctccctggcttcatggagagtaaggctggacatgggagacagacattaatcaaataagacacaaatggtaaattacaaactgggataagtgctaatgtggaaagtacagaggactgtgagactgcatagcagagagatttgggggcccagaaaagtatcccctgaagaagtgacttttgagccaaaagatgaagaatgagaaagaatttaactttagttcaaaatcaaacattcttttacatgatacagataacatcccaggaaactaaagtaccactgcacaagcttggaaaaaagaaaggccatttcttccactggcgggttgcagaaagaaagcaggcctagagttcaggagccctggcggcccagaggtaccactaagcagctatttactgtgactcaagcttcatgtcctctccatgttgctacttccctatctgcacatttggataacctactgcacagggtagagcggcctgaaaagaccatgtctggtaaagcatgttgaaaagcataatgtgctttcaaagcacaaattgttgttgccacgttatgtacatatgaccacctcactgctactcactggacctggttttctaggtcacagttgaaaatcaggaagtcccttacaggaataacgtgctatctgtccctcctctctacttgccagacttggaccacctgtctctcatgacttcttactggaggctttattctgtggatggttgatctctttccgccatgacataatgaaactccctgagatcaaggatcctgtcttactcattttagaatccccaacaattagtacaggggtgggacatttctcactgtgcacacttagtacaggggtgggacattactctctgtgcttgagaaatgttcaatgttgctattatttatcacaggtgaacattttagttcattcggctttttaaaatattttgaagttctgccttttatggcctttgaataccctccttttcacaaatgtggatatcttccttggtctgaccatcttcttcatgaaagattatttttgtagtgattatcaggtcatcttctgatttctttttaaccaaggaaaaggtatgtcttaattgactttgagtctcaattttgcacttaagaacccaatttgagattttatagagatataaatatattgaagataattctttggatagtcccaagtcttttcaagcagaagccatgcacaaaattctgtgctgaaactgtactaaacttgtgccatgttaacaacttgcactttttaaaaaaatggactctccaatgatcttttttttggtatagtaaaggaataagcctaactcttctcatctccagaggttcaaagctagtttattaagtgtccttaaatatctcaattgccagagttacatatagtcaatcatatgttaaaatggaaggcatttttaaatagctggttaaaatttaaaattttttctgaattttattttgttttttaatagtccaaaagtgagccagtgcctagagttattgcgtctttcctcgctgagatgatatgccttacaaatgtgccttcaaatgagtcacacaactctcccttcaagtgatgtttattaattctcccttcaagagatgcaaaagaccaggtgaggtcagcaagcaattcctttgcccctgtgagccagatagctcctagagtcaatgtgttatctagccttttaagagcagcagcaagcagaagaaaaactcgtagaaaacccagctctttgcaatagataagctatctgtctggaggaaaattaatctgggcttgaacggtggctacttcatttaaggtgataattataaatataaagaatctggaataagtgtgctggatggatctctcgttttcttcatcctgctttttgagagccagtgccagaaaattgaaaggggaaagattaaaactgtaaccactgacatgactacaagtttactgacaaggcccattccccacccaacaaacaagaagcccagcttgatatcatcagggagggtattgtgatggccagaggtcagcagtttgacttttggaatgaggaacacacagctttcttgtctccatccacactgataaagaatcactctcaatcagcagaggacccctctcaacccctgcacaccttgatctcttcggtgcatagttaacctgggatgtatactcataggaaagattgcacagagctccctaactccaccaaatactgaaaatacctgaaaatctgtttctgaatggttttccctctttggagacccacacagagacaacaggtccaaactgtcaacactgagcaaagaaagaaatgaatggattctactaccattgctaaagatgttaatgagtttcaatctactccagaaaacaataattcacaatcctttgagcttccaactgggagatatctaaagtcttattttttggttcatttgcttggcaagcctaagtctaaccttcttcccacagagcaaatccatcatgtggctataatgtcctgcaagaatttaagtatagggtaaagtgcaatatgagaggagaccatatataagaacaccaaggaaactcttccttctgaatttggttttaatggaaagatcaacaagtagctataaattaagcctcagacctttaaggttttttctaacacaaaaaggtgagaatatccttcctcataccactccttgcttcccctttctttactttctcccaatcccaaatgatacatgttcagatttgttcccccataattgggagctgccccaaaattatgcagacaagagtttttatattttttcactgttaatgatttggtttgaagcaagaaatttctatgctatagttctgtttacataatcagggaggagggtgtagaaatgtagtttgaagatcttgtagacctcttagaatggaaatcattttaagcagagtaagatacaaatataaggcactgttcattattatcttgacaggaagactgcagacatgttttattctcacaatttgacaacatggctgaggacaacatagaaaaaaccattattatgaagaaggaatcttaaaagtaggttaggaaacttaagccaagattgggaaacacacacacacacacacacacaagaaattaccgatacaagtccagcccagacacctgggacttttcaaggtcctagagtcatcctttataagttactttatgttatttcctctggctccaagacagattaatccagtcaatgtaatgatttgccagaaagaatctaccagtttggccaccagcacttacttcaagcgctacccacaaagttaaacaagcaatcatcatcatcatcatcatcatcatcatcatcatcatcaataacatgtattaaaaactatgtgccagacatgtgtcaaagtactcaatatgtataaactcatttcatcttcataacaacttcatgaagtaaatactatgatgactcccattttatagagtaagaacctgagcattaagaggttaaggaatttgaaaaaggtcacataactggtaaagttggagagccagaattcaaatccaatcaacctggctccataacccaggttactaaccactaccacagatacatctaccacttataggctgcagagtaagtaacaggaagaagcgaaaaattaaagaagaaagaaattgaatgaaatggtaatagaaaattcttaaaagagattatgaaaagaaaaagaagaaacccaagaggaaggggggaagattttctttctgccagtcagtttcccatccacattaggaagaagggaaaagtgaggccaactctagtttcccacaacttatggcatagttaacaaagtacttcaatatgatataatctaggaattctaggaaacctacacaggaaaaataactttccagaaggagtaccaggacaaacaggagagtcaataccaaaaaacaggccataaagttagtctcatgaaggtaccaccacgactccccaaacccccattcctggtgaatttcaagtccctaaagtgactgccatcatggactagctcttagggaatgcagtaatatacaaggaaaaaaacagagaagcatatccttccccagtccaaaagtaatttgaagaagctttcaataaaaagttatataaaaccagatttattaaaaaagaaattcagaaagaagaaagaaagaaggaaagaaagaaagaaggaaagaaagaaagaaagaaagaaagaaagaaagaaagaaagaaagaaagaaagaaagaaagaaagaaagaaaaaaagaaagaaagaaaaagaaagaaagaaagaaattcagcaccttggaaagagaaagaaaatatggtcatcccgaggacttgtagaattgaactaacatcaagtttagtctgggtggctttcaggaagccaaaggaaaaagagaaataaactaagttatctagttttccttagctcactccctttgtactaactgggtcttaagcctgagattccttgctggtctctatccacagtgacctaatcttagacctcaactagaaatgtgcctgagagggttgctccaaggagtccagatccacagcactgccttcttcccataacagagctatcaccaaaaactgcaaaggagataaaaactgacatagttctaaattccttaaaaaaaaaaaaaactcacacaagctctattacaaaagtgaccgagcaacaagatggaaaaatgtgcatcaaatgctccaaggaatagtacaaagaagtaagatgccttctaaggggtaaacaaatgtttataatgtacatcatgtttagtggcacggggctacatgttttcattgaaagccagacaacaccatggtttcatactttagtagttattcccagggacccacctgggcagaacaaaagacaaaatctaatcaaagagacaggaaaactagctgcaccccagcattataagagtagccactttccaatcactagaaatggtgtggctcagcctccctgctggaaatgtagccccaaataatttgaatactcatcagcaaatcattgctggatgaatgtcaatatcctagaaaccagttattctacagagtgctgccttcttcttaattagaattctcttgtgctcaacatgtatttattgaaatctgacttcatagatactgtgctaagaattaaattaaaaggtaaacaaaattacaagtgaagtagcaattcccacagcattttattaatcaatccatacaaaaataattattgcacacctatagtgtgcaaggtactaaagaatgaaataaaatcccatttctcatggaacagacattctatttgggagagtgaaattacagctattaaagtaaatgtcacaatgggaaaaaaaacttgcaaaaatagagctgggtaaaaggtaaagagtaactgtggggagtagctctctgagaagtgatatttgaacaagaaccattaggcttagcataatggcagtcattggtagcattgaaagaatattttcaggagattggtgaagatgaaggactattttcagtgggttctaaaaaaaggacaatcagttggatatatcacatatgtaaaaaaaatttttttaaagaaagaaacaggacgagggtaaacggaaacagccattaacgttaatgctaggaaactctgttgtaaaagggagcagagtaattggcaacagctaagagggatcttaggatctttttaaagatgggggatatttataacatccttgtatgatggaaactaaataaaagagagttttctttccttcctccaggtttcagggctctgaatcctatctcaattgtgagaatgctaaaaaggtacatctgtgatgtgacaggtaagatggggtcctttggagagtcgcctgcttcttctttctggcttcagggagagagagaatagcaagggcaaggctcgctgggcagcttaaatgtggaactgagtttgaagaacatgttcttcatgcaccctcacagtccacaaaatgactttaaccatctttttattcccctcccactgttccctcagctggagtttcagcagttaaagatataaagaaaaatgtttaaattctaaagagcagaaagtcaatagaaataaaacttctgggacaaagcagccccagttgcaggcagaccaagtactgctgattaccagcaagaaagccttcattgtaacagggattttaccctttctttggcattcctaagtaacaaaagagaagtgctgcaaaccaacgataattagcaatagttttattcacaccaaaatcattctaatatggtgcttgaaaaagcaaaataatcttttcacttaacagaaaaaaactgtactatttttgagcaactgaaagtcacgtcaatatattaattgaatgacctataattgctgcattgttctgatgtttatcttagaccctgcatgagtggtttttccttgatgctaatcccattagaagtaaaatggaccgcagttttgaatctctctgttccttaaaaaaaaaaaaaagttaattgacaagctgtttaatatgagatgccattttacagatgaccagattgaataataaaagaactaagggggaaaatgagcttttacctgtttcacaggttttaatatatatatattcaaaaatttttctaaaagggtaaaataaccaccaataccttatgcatataaagatgaagcagataaaaagaccaaacgcaataagaatctctcatactataccacatttatctcaaaaataatctttttgttgagaccctaatatcctccccttcctcaccatctcgaacattctctcacctcctctctccctgcctgcctccctgagaggactcttacacaccactctttgttctgtaaaggaatgcccggaatggacacaaggtactctgtcttggagctcagtgtcttgattttagaagcttgaaagggtatgaactacaacctaggggtctggaatgacaggcagggctacaaactacaacatcaagctccctaatccttttgaatattagagggaagaattgagcccttctttggagcttttccaacatccattactatttttaggtggtttccaggtacctaatatattcattcctataggccattctatttctgagaaatagaaaaacaaaagccccattcacaggctaattctaagtttgtccacaagtaatgatttccatgcatcgtcactgcagaaataataaagtgtcatgtctcatgaagatgatttctggctaagcctcatttaatctttgatcacatgaaaacattctaatttaaagcaactaataacagctgttatatatctaatgcaacatttaaaataactaagtactgctatgactaaatggatttcagcaatgatcatcaatggctactcacatcacagacagctagctatcctgtgtctcctaatgaaaatacacagatttatataaaaagtactcttgccttcccttgtttccccaccaagaaaatccttgcacctgttcagtcccctaaatcagtggttctcaactggatgatttggctcctggaggacatttgacaacgtccagagacattttggattgtcacgactgggcaatgctacagacatctagtggatagaggccagggatactgttagacattctacaatgcacaagaaagaactgtccggtcccaaatgtcattagtgtgaaggtcgagaaaccctgctccaggtctagctactaattgccaagaaatacagaggacagagaatgtgttaaaggacatcaggggacacaatgaacacaagccagactgtgggaaactccaggacaagtgacctgggtttttttttttaacaagtaaattgcaaggggtaaagaacagaaatagaaggaaaccccataaattgaaaggcttatgagacatatcaactaacttgaacataaagattttatttggactttgatttaaataatcaaactataaaaaataacaagatgattggggaattttaaaaactgactcaatatctgattattttaaagaagagttgtttaatttttaggtgtgataatgatattatgattatgtttcagtccttatattttagagataaatactgaaatatttacaggtggaattatacaatgtctaagaaatacttcaaaataatggggagaataaagagaataaataaaacaatattagttatgagttcatcattgatgtaattgagtgatgcatacaaaggggttcactatacacttcatgcttcttttgtatatgttaaaaaaaaccttccatactaaaaaaggtttagacaataatatgtaaaaataataaaatagctaagtaacctttaaacaaaaataagttatacgtttctattcctaaagcaaaatcttttaagagcacaggcatatggtttagacctaggttaaaatcctggctcccctactcttacatcttgataatctttacaatctctgtaaaacagagctggtcctcatacccaccttgcagcattgacgtgaaaagtgggtaaggtggtggctggtgctcggtgactggcagttccctttcccactttccacaagagctttaaacaaagaaggaaaacaaaatgggatcactcctgcaacccatcccctatactagcattttctaaggactttgatcgaggccattcatttccttcttgtatatatctgactgtgaccagatcaaagcactaacaaaagaataagaagtttcttttctacatttcctctgatttctgaggtttttttttttacactgctccataaatgaaacttagctataaataaacaaggtagagggaaataggaaagaatgcctcactgcaaaatcccttacatgcatgtgattcattttaggtcacagtgtgccctgaagggttcatgacttgtatgattccagaaacagtaagccaaatttggttttctttccttagtgaatcattatttcaccaactatttgtacttaaatttttttaaataaaaaaaaacttgattaaaaattcctgcccagatataataacttacaaagctcatttcctctgcttcgttcccttttacagcagctacttacatattcgtatcctgccaggtttttgccagaaggttcattggcaaagttgtgagccggttgtattagtgactttagtcttggctgcaaacattctgtttcagctgacttttattttccccaaagtagcagttcctttagtcccactgcatttgcaataaagcactcattttcatctacttgtaaataagggataaagacacagacttttggctggtggtacaggcctctggtggtctcttaacttgtacaagataggactttctccttctgtaaataaagccctccatgaagagcaatcaccagacttggaactagaagacaaattaagccctatctctactatacaacctcaaacaagtcacgcttctctttgaagtttttgtttattcataagagattataatagtgcctgccctattgtcctcataaaggaacctaatagtaacaactagaatttatataatgctctgaaatttataaaatgctacaaaatataacatatggtttatcattattattaatcaaaaatatcttcttcatttgcctaaatgaagaacctactgtgtgctttacaaagcactgaaaggagaatctttgacccctaaacttgctattctgtggcatccagacacacgctaccatctctaaacttgccagagtttagtctaaattctttgcataatttccagagtgaaggtaaatccaaagtggaaacactgtaatgtctttcaaaaaataaagacatatgcacatgtatgtttattgtagcactatttataatagcaaagacttggaaccaacccaaatgcctatcaatgatagactggataaagaaaatgtagcatatatgcaccatggaatactacgcagccctaaaaaggaacaagttcatgtcttttacaaggacatggatgaagctggaagccatcattctcagcaaactaacacaggaatagaaaaccaaacgccacatgttctcactcataagtgggagttgaacgatgagaacacatggatacagagaggggaacgtcacacatgtatcccagaacttaaagtaaaattaaaaataaatagataaataagaatatttcagatgaaaattagaacagaactgtactaggaactctgctaggaaatggagagacaatggcaaatagcacagacatttctcccaaagaaaaataacatgcaagggagaaagcactggagaagggtcgtttttaaaaatgcaccatgtggtcatggtatggatggaagcataggtcttgcttttgcacatatacaagtatatcttccatgaacagtatagtttgaaatgtacagtgactagaaacaatttgcttgccataatcaatgtatgttagctcctaccctagtcacagcaccatattgggaagtttagcaaaatttacacaagatagttcttttatcagaaagcataaaataaaccatttgtatcaaaggaaggaatttagagacaatccagagaactaaaattaaatcaaaattataaaacaatagaggagatatcccgtgagaataggctaaaacttgaatcttccgttggagacataataactgaaaagtttatgatcaagatttctaaggtacacaaaaatctgctcaccaattaatggaatactgggataatttcttgaagtttgaaatataaatttaagagcaaacaaaaggaagtacagtcaggaaccgcatatggctctttcggtcaacgacagaccgcatggactacatgtactacagtggtcccctaagattataataccatatttttgctgtaccttttctatgtttacatatgtttagctacataaatacttaacattgtgttccaattgcctgtagtatttagcacgggaacatggtgttcaggtttgtagcctaggagcaacagtatatgcctagggtatatactgtttaccctaggtgtgcagtaggctataccatccaggtttgtttaacaacactctatcacgttcacacaacaacaaaattgcctaataatacatttctcagaatgtgtccccctcattaaatgacacatgactatatctttatacagcacatagtaaatttatgaaatgcaggactgcacgaaaaggcctgtcagaaatatatgttatatgtatatattaaaatatatatatattaaaaactcaaggaacttctggaaaaattcataaacgctagacttgtaagaacttttcagagaaactaggggccagacacagtggctcatgcctgtaatcccagcactttgggaggccgaggcgggtggatcacctgaggtcagaagttcaacaccagcctgaccaacatggtgaaatgccatctctactaaaaatacaaaaattagtcgggcgtggtggcgcatgcctgtaatcccagctactcgggaggctgaggcaggagaatcgcttgaacctgggaggtggaggttgcggtgagccgagagcatgccatcacactcagcctgggcaacaagagtgaaactccttctcaaaaataaaaaataaaaaacagaaagagagagaaactgtggtatgcctgagattaaagacaattatatggactataggactgacacagcagactaattcctatcttctcatatcctaacacttctatataagcctcgaaagaggaagattgttctttacttacctgttactagataatgaaccatgattgcactttcttattttggtgtggtaatatttatacattatacatagaatactatgatttatatgtcttattttgtggtgatcagttacaaagagatatagtatgctgctgttataggaaaagacattttcaaaatgtaacacttttccaaaggtaatctgaaaaatgttgagttcataaaagcaggaaaactagtgagaaatttgacctagaaacttactatagctgtgtaataacagttaaaatttaccaaacttgattctgtactcaatgtatttaattatccttcctttcagaatctatgttcatgttaaaagtttcttactataaaaaatacagaaacttgatgcactaaggcaggacactcttagaatgtcttgttaaaaatagactcttatcagaacatcacccctaatccacaaaagaatctgccaagagattgcaataacaagaggcatattgtaggcatttatgtccatcaacaaatctaacaaattgattaaaatgccaaagggacaagggtgaaaccaaatacagtgcaaggactaaaacagactcacggcagtcattctcatcagctccatcggggcagtctctgacgtggtcgcacctgtattcacttgggatacactgaccattggagcatgttatctgatgacttgagcatgtactttgtgctgcgaagagaaaaaattattacttaatttataattattgctagacacagactaatctattgtcattaacaaggatattggaaagcataaagttcatagggacacaaggtaaagtacctggctaccaccaagctgagcttacaaagcaaaaacagaagtataatgttatcaaaatgcccagagaatagtgtccacactcaagcatgctatgtacacaattacgttatcaacatgtgtaaagaatacaatatagattttaaaactatatggtaaaaagtttaatgaaataaaaattttgcaagtataggtattaaccaaggacccccaacccacccattgaaatccttgtataaacaagaaggaaatataccaaagctttaatagcagttattccagagtggtgtgaatatgaatatgagtgattttatttttttctatatagtttcctctattctataaactgcctacattgaccatgtatcaattttataaagagaaaaaaatttaagctagcttgatttcatcccatgttgattagtataggtgaaagcagggcatcagcagttcatgaaatttgcctccggataaaacagataaaatccagtgaactgatgcccgcaagcatgatgtgaaagctatcctgtaaatctgaggcaggaattaccataacatggtaacattatcttatcctgggattttaaattgtctacatacaaagagctttgggggaaaacgtgatcatctaaaaaatataatataatcccctaatggaagaaaaaagatttgctctcaatttttacaaaacttcttttttttataattccttttttattattattattttactttaagttctggggtacatgtgcacagcgtgcaggtttgttacatatgtatacatctgccatgttggtgtgctgcccccattaactagtcatttacgttaggtgtatctcctaatgttatccttcccctctcccctaccccacgacaggacccagtttgtgatgttccccatcctgtgtccaggtgctctcattgttcaattcccacctatgagtgagaacatgcggtgtttggttttctgtccttgcgatagtttgctcagaatgatcgtttccagcttcatccatgtccctacaaaggacaggaactcatccttttttacggctgcatagtattccatggtgtatatgtgccacattttcttaatccagtgtatcattgatggacttttgggttggtcccaagtctttgctattgtgaatagtgccacaaaaaacatatgtgtgcatgtgtctttatagcagcatgatttataatcctttgggtatatactcagtaatgggatggctgggtcaaatggtatttctagttctagatccttgaggaatcgccacactgtcttccacaatggttgaactagtttacagtcccaccaacagtgtaaaagtgttcctatttctccacatcctctccagcacctgttgtttcttgactttttaatgatcaccattctaactggtgtgagatgatatctcattgtggttttgatttgcatttctctgatgctcagtgatgatcagcattttttcatgtgtctgttggctgcataaatgtcttcttttgagaagtgtctgttcatgtcctttgcccactttttgatggggttgtttgtttttttcttgtacatttgtttaagttctttgtagattctggatatcagccctttgtcagatgggtagattgcaaaaattttctcccattctataggttgcctgttcactctgatggtagtttctattgctgtgcagaaactctttagtttaatgagatcccatttatcaattttggcttttgttaccattgcttttggtgttttagacatgaagtccttgcccatgtctatgtcctgaatggtattgcctaggttttcttctagggtttttatggttttaggtctgacatttaagtctttaatccatcttgaattaatttttgtataaggtgtaaggaagggatccagtttcagctttctacatatggctagccagttttcccaacaccatgtattaaatagggaatccttttcccgtttcttgtttttgtcaggtttgtcaaagatcagatggttgtagatgtgtggtattatttctgagggctctattctgttccattggtctatatctgtgttttggtaccagtaccatgctgttttggttactgtagccttgtagtatagtttgaagtcaggtagcatgatgcctccagctttgttcttttggcttaggattgtcttggcaatgtgggctcttttttggttccatatgaactttaaagtagttttttccaattctgtgaagaaagtcattggtagcttgatggggatggcattgaatctataaattaccttgggcagtatggccatttccatgatattgattcttcctatccataagcatagaatgttccttcatttgtttgtgtcctcttttatttcactgagaatggtttgtagttctccttgaagaggtccttcacatcccttgtaagttggattcctaggtattttattctctttgaagcaattgtgaatgggaattcactcatgatttggctctctgtttgtctgttattggtatataggaatgcttgtgatttttgcacattgattttgtatcctgagactttgctgaagttgcttatcagcttaaggagattttgggctgagacgatggggttttctaaatatacaatcatgtcatctgcaaacggggacaatttgacttcctcttttcctaattggataccctttatttctttctcctgcctgattgccctggccagaacttccaacactatgttgaataagagtggtgacagttttcaaagggaatgctcccagtttttgcccattcaggatgatattggctgtgggtttgtcataaatagctcttattattttgagatacgtcccattgatacctaatttattgagagtttttagcatgaagggctgttgaattttgtcaaaggccttttctgcgtctattgagataatcatgtggtttttgtctttggttctgtttatatgatggattacgcttattgatttgcgtatgttgaaccagccttgcatcccagggatgaaaccaacttgatcatggtggataaactttttgatgtgctgctggattgggtttgccagtatttcactgaagatttttgcatcgatgttcatcagggctattggtctaaaattctctttttttgttgtgtctctgccaggctttggtatcaggatgatgctggcctcataaaatgaattagggaggattccctctttttcttttgattggaaaagtttcagaaggaatggtaccagctcctccttgtacctctggtagaattcggctgtgaatcagtctggtcctggacttcttttggttggtagcctcttaattattgcctcaatttcagagcctgttattggactattcagggattcaacttcttcctggtttagtcttgggagggcgtatgtgtcaaggaatttatccatttcttctagattttctagttgatttgcatagaggtttttatagtattctctgatggtagtttgtatttctgagggattggtggtgatatcccctttatcattttttattgtgtctatttgattcttctctcttttttcgttattagtcttcctagtggtctatcaattttgttgatcttttcaaaaaaccagctcctggattcattgattttttgaagggttttttgtgtctccatctccttcagttctgctctgatcttagttatttcttgccttctgctagcttttgaatgtgtttgctctggcttctctagttcttttaattgtgatgttagggtgtcaattttagatctttcctgctttctcttgtgggcatttagtgctataaatttccctctacacacgctttaagtgtgtcccagagattctggtatgttgtgtctttgttctcattggtttcaaagaacatctttatttctgccttcatttctttatgtacccagtagtcattcaggagcaggttgttcagtttccatgtagttgagcggttttgagtgagtttcttaatcctgagttttagtttgattgcactgtggtctgagagacagtttgttataatttctgtccttttacatttgatggggagtgctttacttccaactatgtggtcaatattgaaataagtgcaatgtggtgctgagaggaatgtatattctgttgatttggggtggagagttctgtagatgtctattaggtctgcttggtgcagagctgagttcaattcctggaaatctttgttaactttctgtctcgtggatctgtctaatgttgacagtggggtgttaaagtctcccattattattgtgtgggagtctaagtgtctttgtaggtctctaaggacttgctttatgaatctgggtgctcctgtattgggtgcatatatatttaggatagttagctcttcttgttgactggatccctttaccattacgtaatggccttctttgtctcttctgatctttgttggtttaaagtctgttttatcagagactaggattgcaacccctgcctttttttgtgttttccatttgcttggtagatcttcctccatccctttattttgagcctatgtgtgtctctgcacgtgagatgggtttcctgaatacagcacactgatgggtcttgactctttatccaatttgccagtctgtgtcttttaattggagcatttagcccatttacatttaaggttaatattgttatgtgtgaatttgatcctgtcattatgatgttagctggttattttgctcgttagttgatgcagtttcttcctagccttgatggtctttagaatttggcatgtttttgcagtggctggtaccagttgttcctttccatgtttagtgcttccttcaggatttcttgtaaggtaggcctggtggtgacaaaatctctcagcatttgcttgtctgtaaaggattttatttgtccttcacttatgaagcttagtttggctggatatgaaattctgggttgaaaattcttttctttaagaatgttgaatattggccccccctctcttctggcttgtggagtttctgccgagagatcagctgttagtctgatgggcttccctttgtgggtaacccgacctttctctctggctgcccttaacattttttccttcatttaaactttggtgaatctgacaattacgtgtcttggagttgctcttctcgaggtatgtctttgtggcattctctgtatttcctgaatttgagtgttggcctgccttgctaggttggggaagttctcccggataatatcctgcagagtgttttccaacttggttccattctccccgtcactttcaggtacaacaatcagacgtagatttggtcgtttcacatagtcccatatttcttggaggctttgttcatttctttttactcttttttctctaaactgctcttctcacttcatttcattcatttgatcttcaatcactgataccctttattccagttgatcgaaacggctattgacgcttgtgcatgcatcacgtagttctcatgccatggttttcagctccatcaggtcatttaaggtcttctctatgctggttattctagttagccattcatctaatcttttttcaagatttttagcttctttgcgatgggtttgaacatccccctttagcttggggaagtttgttattaccgatcgtctgaagccttcttctctcaactctcaaagtcactctccatccagctttgttctgttgctggtgaggagctgcgttcctttgaaggagaagaggtgctctgatttttagaattttcagcttttctgctctggtttctccccatctttgtgattttatctacctttggtctttgatgatggtgatgtacagatggggtcttggtgtagatgccctttctgtttgttagttttccttctaaccatcaggaccctcagctgcaggtctgttggagtttgctggaggtccactccagaccctgtttgcctgggtatcatcagtggagtctgcagaactgcaaatattgcagaacagcaaatgttacttcctgatcgttcctctggaagcttcgtctcagaggggcacctggccgtatccggtgtcagtcggcccctactgggaggtgtctcccagttaggctactcgggggtcagggacccacttgaggtagtctgtccattctcagatctcaaactctgtgctgggagatccactactctcttcaaagctcagttggaaatgcagaaatcacccgtcttctatgttgctcacgctgggagctgtagactggagctgttcctattcggccatcttggaacctccctcctctcccaaagcgctaggatttgaatgccacaatacatattgattcatgtttttgtccattagtggtccgtgggtatctataaatgaagtctattttagagtccatagatatcagcgttctgcaaaactgtcagggatccgaggctcccagcctacagagcttcttttacttatatgtagtatagatatttaggttcagcaaaacttggttttctgataaaattagatctgttaaggaatgtacccccaaaacttaacatgaaaaaccttttcaaacgacaagtaaacctggcacagtggctcgtgcctttaatcccagctatgggagattgaggcaagaagatcacttgaggccaagaattcaagactagcctgggcaacatagtgagatccttatatcttaaaagaaaaaaaaaataaatttagctgggcacagtggctcacttccaagtagctgtagtcgtagctatttggaaggctgaggtaggaggatcacttgagccaaaaaaaacttctctttttatgtagttagagtgagctataatcatgccactgcactccagcctgggcagcaaagcaagacccctgtctctaaaaaaaaaaaaatatgtaaaagataagtagacagtgacagttttcaaggtggtacttgaaaattcaaacatatagaaattatcatgtgataagatataataattataaaaccataattaacacccttctccatgcttaattgattatatcttccttgtcattttgttccttctttctgtttaattagcaaaatggtgtcttataattctggaacagcaaacaaaatttttcaagtcagcctacttctaacactaaataatttcatattttctctaagtaccttatacctgtgggtccaattttacttctattaataaaggcagaatagatagatttttccagaaggcacttaagtgtctgaattctgcccatggcagagacacaattttatctgaaaaaggttaaagagattaatacttcctcattaaatttccaaataatttatttaagtatatattgccaattttcacataaaattaaagaactttcttttattcccgagaaggcaagtcatgggttgtctcaaacaaaatatgaaaagaacctgggtcaggtatcagtgctcgttcaattaccttggctttcttctttacgtcaagcccaaataattctaaatgttgtgcttaggttttcaaagggcttacgaagaagcaattaaaagctcattcaaatgtagagagcaaacaaattaaaattatataattccatcaacctatctaatgctgagattcatctattcattaattacacaaacatctgttgagggcctataatgtaccacacagtatagcaatatggggatctgcaaatgaataaggcacaatccctaccctcaagaagctcatagtcttctaggggacactaaggagtaattagaaaacaattatgaaagtggattataggcacacaggaatgatagaaccatcaatccaggaacttaattcactctgggatgggagcatggatggggacagtttccttgaaaaagtgacacctccctgggtcttaaagaagcagcagtcaggtaggccaaaagcaaagaaggactgtctagaaccgagcattcagcattcagccagcttgcacggagacaaaaggctaggacacagcatggcacacccacaggaactaaaagcactgctgtgcccaagtggccacttcaaggcaagaatagcaaatgatagacataggaaaataagcactagtcacatcttggaagccactgtaaaccgtgttagggaattggaactttctcctggaattaatggagagctaccaaagaatcttagttagatcagcatcagtgtcagagagaatctaaggatccacagaactggaggcagggaggccaacccagagactactgctgacacccaaatgagagatgttggcagtgggagcagaaataaagagatgggtcagacatggtggctcacacctatcatcccagcacttggggggccaaggtgggtggatcacttcaggccaggagttggagaccagcctgggcaacatgggaaaaccccatctctacaaaaaaaaaaaaaaaaaaaaaaaatacaaaattagccaggtatggtgccatgcgcccgtagtcccagctactctggaggctgagaagtgggaggaccatttgagcccaggaggtcaaggctacagtgagccatgattgcaccactgcattccagcctgggcaacagagcaagaccctgtctcaaaaaaaaaaaaaatctgtccttgccaaaaaataaaaataaaagagagagaaatgaagagattaactttagaaatatttatgaggcaaattaggcaggagttggtgattcaatgtgggcagtgaaaaagaggaaggaatcaagaataacctccaagtttctagcgtgggtgcctaggggattgtgatagccttttcatgttaattgattatatctttcctgtcacttacagcaatctttcttcttcatctaataaaatactttcattatgaaatatgtttcacaaattcaacaagtaagagagcctccatctgcctatttccaatagtttaagactgattttgtattttctgccagtgcctcatagtgggttaaatgctatttctattaataaagataaaatatgtagactagcaaatatagaaggaaaatccagttcaggagggaagatgattattttcagttgggacaccttgagttcaaggcaacttgcagaggtccaaaggtagttgagtatacaagactcaagtgtgggcaaaaatctgggttgtaaacacagatttaagtctcatcaggccacagagggtcactaaagtcatgagaatggtgagactatcctgagagtgtccagaatgagaaaagctgctcagggcagggctctgagcaacaccaatactcaagggctgagtagaagaggaaaataaaatggaatgaccaaagcagctcaaaagagagccaggactgctgggagtcatggcagccaagggagtggtgtcaagaaggaggaatggtctccagagtcaagtgcaatctaaatgcccatccagtgtgagaaggaaggaaaagtgcccattggcaatcaggagttatctggtaactttagtgaatacagaggtggcatattttgtttgtggttaaaagatatctaatggagaatttttatatcattaaaaatgggagaattgcctcatgaaatgtatagtcatttaaaatgatatgcaatattgttttaaaatgactgctataaacttatctccagtctcttttcccaagcagttgcccttagtagttccaatcccctctgtaaagtattattattagcaaagggtcatccaccacacattgaatcgcaaaataaagctcagctttcttcccactctgtgagaggagtaagagaaaatagactcaaaactatatagcctaaagatgaacaacccatcatttatgcatttagtatctatctattaagaacctcctctctgcctgagagaatgtcaggccttcaggatgcaaattttgagacttgagcagcttttatgcaatcaagaaaggccaataggataaatatggcagagcaaaaaagtgagaaaaagctggataatatttctgagctgggaattaatcaaccctggaacaaccctatagttaggcttcttattatgtgagataataaatcccctttttgtttaacttttttgagttgtgttttctttccttgcagccaaaaacatccacaatgatacaagaatgattttaaattatacaaatatccttaatagagaaaggaatggaatgatacatgtgatagacaaattgctcataggtcgccatcttatatttacccaacattacttctcatctaaaattattttcaggccagtcatgggggggtcatgcctataatcccaacattttgggaggccaaggcaggaggatcactttagcccaggattccagaccagcctgggaaacgtaacaagatcgtgtctctacaaaaaatttaaaaattagctgggcatggtggtgcacacctatagtcccagctactcaggaggcttaagcaggaggattacctgagccccggtgtttgaggctgcagtgagctgtgatcgcaccactgcactccagcctgggtgagagagtgagaccctgactctaaaaataataataaaataaaaataaataaaataaaattattgttagacctattaaaacagtcttttccagtctgattccaaagaaattagaatttaaaggttttttccaggttactgaaccaaaccccctcaatgtccagggatgccgcagttgccaagatccgcttcatcgctactattttctttcttgttcaagctctccctatggtggctgtggcagcagtcactgaagtaaccaccaagaagccctccaacaaacctacctacttccactcagtcaaaaagaagagaatttaatattggggcagaaggagtggaaggtttgaatacaaagtatgccacagagccaaaggactcattcagctgtcaaccacacacatgaagacacccagctatacactccaataaatatttggttcctttcttgagcataacataatcaaaattaaagattgggaacctatctcacttccaaattgctggggtatattcataattcttcagtacatccgtactttcaatatcatccaacccctgaatgagattgctggcataggttcccttatgatttaaggccctgctccacatttataaagaatcatcccattgtgtgtaacttctttgcgacaggttgggttttaggtgtccacaaagccaaagcaagattcctctccaaacacttacagcaatcttgacgttcatctgagccatcatcacagtcttgatcttggtcacacacccaggagttggggatgcattgtccctcactctggcacttgaaatagccctgctggcaggtcacaacagctaaaacaaaccaaaagaggactcattatggcaatcatcctccccattatactagcaagcaatgcttgttccagaagagtgtatcatgtaaactcctgctcaatttatttgaaggcaaatagtaaacaacccttatactagagtctgtggacgccagtcagagttcactgtcaaataagctcagcaacagcatcacaacaaactcatgaaccaaagcaacttaaaaacacagagaataaaacaaacagcacacatacacacaaaaaaattatgataaaggtattagattaaaagcttcattcaagtaaacattaactgtgagttactgttaaactatttgtttcataataactaatagtaaagtatcatgatgaactggaaaattcatgagatttgggaaagaaaacccaaaatcaaataattattatttccatgatttacttcctttaagatctttggcaggttctctgaacctcaatgtatgcatcataaaatggggactatactcatctcactgtttgttgtgaaaaataagttaaataatgtatgtgaaagcgccatgtaatgttacttgctatcactatcgtcattgatattgttgttattgttattatttttacaggtcaataaaatataatacaggtaacaatctctgaagagttgttggcatagctgttcacttattcctttaccccagatacactgcccttgcctttttgcttttattgtttaatcaaaatgaactcagtaagcccagaggaggcaaatagttagcacatgattgtgtctctacaaatatagtttagtcccttgttcaaagtgcagtccacaaactagcagcatcaacatcatcaggaagtttatagaaacgcagaagctgaggtcccacctcaaaatatggaatctaaatttgcactttaatgagctcctgggtgatccatttgtgcatgagtatttgaggagcactgtacagaaccccatccttacccttcctcccattttcaaatgcgttgtcatctaaatgacacaccaaagtttgactgctatggtatgccataacatggccaacaattcaaaacaaaaatttttcacctgctttcctgatttttgaaagataaccctcattagttcacctgctgggatgaaggaaattgcagatgtatgattgatcacctatgggaagttgggaagagcaatgggatctgtgcatagacttaccaactgtaagaactttaataaatgacttaacttctccgagtctcaatttactaatctgaaaccgacctcagaagattagtgagaaaactaaatgacaaaatgaatgtgaaagtcattttataattaattagatttgaagtttactacattatcgtatttttcaaattttttaaaactagaatttttaaaaaacataaatcacactaaccaattctgtgatttctttatggtaattgacacaagttattctacatcctttacataaaaatggactcctctttgacttacaaatcacagtagttcagataacattattttttgtttgttcttgtgggtacacaaaatttacagagtgaatattagaaataatcacctacagactccagaaaactgcacccaaatatgtttccatatcaaagttgtggtcaagggataagggtgagatagaaactgatgctctatcatcaatgtgaattgaacccctacctcagaagggagtgaaattattgttaatgccatcagttctctattcaaccacacagatctcaaaagacttgggcccagacctggctctgtcactaaaaggcatagctcttctctttgttacagctgaaatcaccaggaagcacttaggttactcaaaatagaacttagcctggcccctcctcacttaccgcagccaatttcatccgcgtcatctgaacagtctttggtcccatcacacctccagtctgcagggatgcaatgcccacttccacagcgaaaatgcgcactgtcacattctgcaataatagacagaaattttaaaaacttatgccatgcagatatttaaccgaagaaatataaatttttgataaaatgaaaaattattcaactaattagataatcaaagaaatgcaaattagaaaattaggtaaacattctcccaatgataatataaaaatatttatttgaacatccgtgggaagaaagtgattttcatacacagttgattagtgtgtatcttgatggaactcattgggaaagcagtttgacaacacgtatcttgctttttaaaaatacttgatctttaatttagtacttttacttcaaggatttttttcctaaggaactaatcaaagaagtagacaaagatttatgtataaagattttcatcgcaacattatttataacaaaggaagttgcaaacctcctaaatgtccaacaataaaaggattaaatttgtttacatctttatattgacatattagtaacttaaaaaatggttatggagaaattctaagtacttagagaaatacttataatttaatgtaacaaaaacaaggacgtaaatttttactgataacagagttacatatgcaaaaaaaaaaaaagcgtaaaaaagaccagaatgttaacagtggttatctctgattgataacatcgtgagtaacttttcatttgcttgactatactttcttgagttcctcaccttattttttaagtgattttttattactaaatcatatatagcaagttatggcctttcattcttagattcagactaatattttgtcttaatttttaaaaattaaattataacttgccagatctataagctcatctctgcaaacaattttttttaaaccaaagagccaaaaacaaaacaaaacaaaatctctgcagccaacaagagtatacaaacttgacaccaaaagttgacaccccaagtggcagtgatagtccctagtgatactggaaggacaatataacttaaacaagctcacttcactgaactaatatatcctgtgattttcctaggtctccccaagggacaaagttccccaaatacctggccagtgaccttcccaagcattatgtgccacatagaaaaatttttcaaagaaagcagccactaccagccccacttagagaagactcaaaattattttattctttcacaaacccaagggataaaggagaaatttttgcagttggaagaataattatatcttccccatgtatttaagcaatcatgctaaattacccatttcaatttttggctaattaaccaaaattaggtaaatatacagatcaagtacctactcctaaaataaataagcaatgtgctatcctgatttgtgtaaatgcaggcatatcaacagcatgacataaacatagttaagtgatctatttctagggtatataggctactttgttcatggaatgttcaaatctgattgtctggtagtgacatcctgatttataatgtatgctgcaaatggtcagaaacttcgcttggctaaatggtggtaccgagtggtacaggagtacgtacacccaaataccttctatagactaatgcatgatggtggttggtggtgcaggtctggggttggtggtgcaggtctcttatcaactacctttaaaacacaacaacctcccttgcaaaaatgcccctaaggaatgtacaaattcactctggaatcccagaacttctcattggattttgttctacaaagcaatatttccatgggagattaggggctttggaggtttagctattaacacaacatatattaaatcacttttatcaattaggtctattgttagtaatccaacataatacatttgtaagttcagtacatttgtctcccttagtatctgaggttgtaaaggtagtatcttctggttgaaaaattataacaatcataaagaacagtcctcttacagacagtttcatattgctatggagaaaagaaaaatataaatttagagactgagtatttaggaggaaattatcagaacaatatatattgcctgttttgaaaatatatataattaatgctatttcttaagcaacttttattacaagtcccatttttgaggagtggggtggggggatttgtttgtttttgccaaactaaaataccaagttaaacacatcatgaaaagaacacaaaatagagactcaaaagtcattttataaaacacttcaaagtcaattatttaaaatcacacatatgaaaaatgaaactgatggggaaatgttgcaattaactaatttttataggtagtgattttcacacttgatctcctcactccattatctaatatatcaaatccaatttactcaatttatcaacagatctataattcatttgtcaaattcaccttttcagtagtaacttcgatgcctgtttataactcccaaacgactattgtttggaaatatctctccagaaaaaacaaactgatactttatcattgctgggtgacctctcagccatcagccaaaatgcttcactggcctcagaagctcattctctcataaagggaatatgtgttgtttaaaaataaaccaaaaataaaccactagtgaaaaggtctagattaggtctaataacaattgcaggtgccccttacttcaattagtctatatgcaatttattttgagtgttttgttttaaataagtagcctttactcacaagccctccaaaagttttatctagatattatctacattttgttatttatttgaagatttaaaaaaaaaaaaagctaaggggatgatttcatacattggagccacccacagggagaaaaaaaaaatctacatagaaccagctttaaaactttgttcagaaaatagtctcaaaactgccacattcaaccaatccagttttagccaagaagtaatcttgcaaataatcatttatgtaactttaaaacattctccaggagcctctctggtttgggggctgcctgattaaaaaaaaaaaaaaatccctctagtaaaaaccaaggaggaaaggaggaaaatacaatccacattgaaataaaaaccttttgttaagaaccaggcaatcatcacaaaggaaccatcggaaccaaatgaacaccctatctctccagcactagcccctgtctgtcccatcaatcagaatagatggtgcaaagatgaaaagaagtactcatatagcacttaaatggcacacaccattctaagtgctctgccaacattagctcatttaatcctcataataaccctatgaaatagatactgttattatgaatattttacaaataaataaattgaagcacagagcaattcggtaacttgcccaagatccaacagcaaatatgtgcaaagcaaggatttgaatctgacagctctgattccagcattcgtgctacttgaccactactctatgttccctttcaccaaaaaaaaaagtttattccactaaactcaagaatgaatgtaaaaatctgatttttttcccccaaagctgctctcaattaacattaattgagttcattattgggctggcatagaatccatagtgcttatatacttcagttggagaaaaagagtagtttacttggtgactaacatagcattaaaaaattattgggcttaggaaaaattgcagcaattgaaagcaatgcaaaaaaaatttaagcgttttgaaatcggtagtaaaattttattagacataggaataaacttgttttccaacctcataaagagcccaaagctaggggaaaaaaaaaaaaaaagagtaatcctttcttcataagtagccatatcccaagcttcctgggtaagtgttggactaagaatgtgttaagataagatattagagtaacagatagcgcccagagaagaggagtcatttgcctgtttgttttccacagcaaggaacaacactggattgagagcattcctctgtgtcatttacagcctctggcacagcaccgggtgcttatggaatagctaatgcatgttcgtcaggaagtgtagaattctctttgtaaaactcagcctgctgagaccattatatatcagagatatagaaagctatcagagcaaacaatgagactttaaatagaaatttaccatcttaaatccatagaaagaaaaatggaatctggaataatctgaaaaaaggggaatatctagaagtttttttcaaaaaaaaaaaaaaagaaagaaaaaaacattgagtcatattaatagcagtttcattcttttacccgttccttgtaagtttctttctccttccataaattctattcttataagacaaagacaagtggtagtcaatggaacattgtccaaagttaacagagtaaggtaatttctgtggcaaatcctatttccccgctagatcctcttaacacatgctggtccttccaaacacttggtctacctgaggaggtacagtcctctttttaaaaatttgtatgagtaaatcacattttaatagttccaccttcactgaactcaaagaaacaaacaaatttaagaggcaattccttaacttatccataatttttgcttcactttttctatacttaattttgattcctttggtatggatagacatccttctgatattcataagttggctgacagttcactacaattcccataccttgcccacataaacaaggccagtccccttttgaagatttagagtcacctgcttatttccaaaactttacactatagtgatgatagccaagggtaacaaattgtatggagcactctaccctgtctagtgtcaaattgatagaatagtcaaggattcagttaatgaaactgaaacaagacaggaacagcaaaccaacctgctagtctctttctgtgcaacattttaactgtctggttttccttacagatcatcaaataggtggcaggaattcttttgggttttttttttaatccagtttacaaaccactgaatagactgctttgtcccaattattgattcagagccctgatgttttcttagagcaaaacaatactataaggacatttcaagaagtcaaagatttggggacaaaacccacaatgcaaattgatgcattatcatgtagacacatcatttaagtgcaaaaataaatgaataaataaataaggaccaaaagaatatgatgccagattcactaaagccacaaataaattcataactactatatgcaattgtcctaggatcagtggaagaaaaaagaaaaataagatatggtccttttttgctctgcctctccctctccctctccctctccctctccctctccctccccctctcccctctcccctctcccctctcccctctcccctctccctctcggtctccctctccctctctttccacggtctccctctgatgccgagccgaagctggactgtactgctgccatctcggctcactgcaacctccctgcctgattctcctgcctcagcctgccgagtgcctgcgattgcaggcgcgcgccaccacgcctgactggttttcgtacttttttggtggagacggggtttcactgtgttggccgggctggtctccagctcctaaccgcgagtgatccgccagccttggcctcccgaggtgccgggattgcagacggagtctggttcactcagtgctcaatggtgcccaggctggagtacagtggcgtgatctcagctcgctacaacctccatctcccagccgcctgccttggcctcccaaagtgccgagattgcagcctctgcccggccaccaccccgtctgggaagtgaggagcgtctctgcctggccgcccatcgtctgggacgtgaggagcccctctgcctggctgcccagtctggaaagtgaggagcgtctctgcccggccgccatcccatctaggaagtgaggagcgcctcttcccggcagccatcccatctgggaagtgaggagcgtctctgcccggccgcccatcgtctgagatgtggggagcgcctctgccccgccgccccgtctgggatgtgaggagtgcctctgcccggcggcgaccccgtctgggaggtgaggagcgtctctgcccagccgccccgtctgagaagtgaggagaccctccacccagcatccgccccatctgagaagtgaggagcccctccgcccggcagccaccccgtctgggaagtgaggagcgtctccgcccggcagccgcccagtccgggagggaggtgggggggtcagccccccgcccggccagccgccccatccgggagggaggtgggggggtcagccccccgcccggccagccgccccgtccaggagggaggtgggggggtcagccccccgcctggccagccgccccatccgggagggaggtgggggggtcagccccacgtccgggagggaggtgggggggtcagccccccgcccggccagccgccccgtctgggagggaggtggggtcagccccccgcccggccagccgccccatccgggaggtgaggggcgcctctgcccagccgcccctactgggaagtgaggagcccctctgccgggccagccaccccgtccgggagggaggtggggggatcagcaccccgcccggccagccgccccgtctgggagggaggtgggggggtcagccccccgcccggccagccgccccgtccgggagggaggtggggtcagccccccgcccggccagccgccccatccgggaggtgaggggcgcctctgcccagctgcccctactgggaagtgaggagcccctctgccgggccagccaccccgtccgggagggaggtggggggctcagccccctcccggccagccgacccatccgggagggaggtggggggatcagcaccccgcccggccagccgccccgtccgggagggaggtgggggggtcagccccccgcccggccagccgccccgtctgggaggtgaggggcgcctctgcccggccgcccctactgggaagtgaggagcccctctgcccagccagccgccccgtccgggaagggaggtgggggggtcagccccccgcccggccagccgccccgtccaggagggaggtgggggcgtcagccccccgcccggccagccgccccgtccgggagggaggtgggggggttagccccacgtccgggagggaggtgggggggggtcagccccctgcccggccagccgccccgtccgggagggaggtggggtcagccccccgcccagccagccgccctgtccaggaggtgaggggcgcctctgcccagccgcccctactgggaagtgaggagcccctctgccgggccagccgccccgtccgggagggaggtgggggggtcagcgccccgcccggccagccgccccgtccgggagggaggtgggggggtcagcgccccgcccggccagccgccccgtccgggagggaggtgggggggtcagccccccgcccggccagacgccccgtccgggaggtgaggggcgcctctgcccggccacccctactaggaagtgaggagcccctctgcccagccaccacctcgtctgggaggtgtacccaacagctcattgagaacgggccgggataaaaaaaaaaaaaaaaaaaaaaagaaaaaaaaagaaataaataaataaataaataaaaagatatggtccttttttgacagagcctataagtttattgggggcaaaagtgatttatatgttataaattaaatatccatgcaataacaacagctgatattgtttactgagtacctactatgtgttatacaatatataaagctttatacatatccactggatcctctcagaactgtatgatgtgagatttatacttatttaatagaaggggaacctgagcctcagtgacattaaccaactcccccaagggccacaaaggtagaaaatgtcgaagtctgatttagccccaggacctgtgtgactccagagcctgtacttatttcatcatttcatgtcctgcaaagcaaatgacagcatttgttcacccagaacttgccagcaatattttaagtgcttcccatgcattaccttacatatcctcacaacagctttgtgagatggtatcaatggccccatttcatagatgaggacgacaaggcttgaacaaatctcacagctagtaggtagtggagcacagatttacactgaggcagtctgattccaaagctatgcctctgacaacagacaatttggttccaaataagcaatggagataataaaaactaactgactttggcgaaaaaaataacactacaggccggtgtcatcagagaagtcttcacaaagaattataagactacactgggtctttgtgaatgagcaggatttgggaaggtgaagagggagaccaggctttgtgtgtagggtcaaaacaacttgacaggccaggcgtgatcactcacgcctgtaatcccagcactttgggaggccatgccaggcagatcacttgaggccaggagttcaagaccagcctggccaacatggtgaaacctgtctctaagaaaaaaaagaacaaaaacttgacagaagcttagcatgggtgagggtctaataagtatgacccaagcagtgatgacctcttggagagtggtaggcaacaaggctgagaagatggagaaaaagagctttcagtgccaagccaaagagtgcctgtcaaatgagtatgagggtgattactcagacaataactgcattaaaagtgaagatcactctgagtaggtaaagcctgaactagcatacagactttgaccatgaaaagagcttggagctccacttcaatccccagaacctcaccccaaccctgagcccagtgagcaggctggtaggtgcaggcaagaggctgctagcagagaagggtctcaccttgcagcccctccagctgccccagaagcatccaaagcaggtccgcttgcatggcaaactacgaacaggttccatgagggaggggtccccagtccctgggctacaaactggtactggtccgtggcctgctaggaaccaggctacacagcagcaggtgagaggcgggtgagtgagcattagtgcctgagctccgcctcctgtcagatgagtggctgcattagattcccataggagcacaaaccctgttgtaaactgcacatgagagggatctaggttgtgcattccttatgagaatctaatgcctgataatctgaggtgaaacagtgtcatcccgaaaccatccctcccccaccaccaccctgctgtccatggaaaaattgtcttccacgaaaccagtccctggtgccaaaaagcttggggaccgctgccttagggcattgccaacaacatcctagtgaccagcccccaccatcctctccaagctggatgtttctgagtatccaggccacagaatccagtcagctctcaagatagttgatctcaaagattacttaaatatttgcttagtaattaaaataaagtgcctttccaataaccaaatggcagcagaatgagatgtactacttgagcagcctctcaattctgagcaatgagagatttaaactgagccatttataactgagctacccttctccatttccatttaaacactagtcacctgtctttctcccccaaggctcttacatcccacttgttttttcattatgcacctctcacctctacaatcaggcagtccatcagcactacagaacattataagcaaagccacacttctcagaggttcttcagaggacgctatcgccatttggggtgggacaattactcatcttgcagaactgtcctggtcaaagcagtatgtacatcatccctgacccccacctgtggaacaccagtagtgctcccccacatcacggtgacaaaaacactcccaggcacatctatgccgcttgagagtggcagtaccacccccagtggagaacaactcagaacctctaagcagcttggacagtcagagctcaaaattatcttagcccacatgaaagagatcatctaaaaaaaaaaaacataatacattcttcccttctaaagataataaaatttcttaaacagcaatcccactccttcccacccatcaataagagcacctaggattgggcaatctcacgctgcagctgctagtaccagcaacttgaaatgaactcccctgggagagtgataaagaatctaatttccaggaaggcctgtttcaccctggaatgctccattccatcacacgtccacaggtctaccccttcaaggggaggggaccacactagaaaaacacaagcatctgaaatcctcaagtagttcatcattaatgtaaaggattgtggctatgaaaaacagtcataagcacctctgcgttgtggtgcaaacttttcccgtccgtattcattatcagagcaaaaaaataatttctccaaatgtcctctccccatcccaactgcatacattcacaaaaaattaaaaatataaattgacaatcacttaagcgctcaaacattcaaaagaatgtccaagtttttaccaagaacgctgagcaatgaaaacttcctgttagccagcatcaaagcactgaaagtgtatttgtaccagtcttttctgtgctccccctgaatagctcatgcagtgcctcctctatcagctaagtcactgaggttcctggagaggaaccttccctacacgtggaaggaaactaagctcaagactttcttctcctctggccccaatccccactagagactaactggttatttacatctttcatggtaaaagagctacacttacaggatgttgaaaagaacactatccaaacagaagaaaatttaagatggcctgcctgcccaggtaaataaggacccaatgaatcaaactacttacaagaataacatgcccttcagcacctcatgatttgacacaccctgtgcaaaaactacaaatcattcccatttcagagcacatttccagtcccagtcacccagagaattcctatacggctttttgattagcaatataaattactggaaaatggttgagtggaatcaaacactaaaaaagaaaatggacattcatgagaaataaatgacaagagagactttagaaaggcagctttcttgcttaaggcttttgaatggtgtttcagactagcattgatagacagcatcaaattagggttttcctgattaattaggtccaagtgttgaaccataaatcaaactgacatggatatgttaaagctataaacatcactttcattttggtcatcttaataatcagatgagatcaccaggttatcaagtgaacaatagttggatactgcaaattatgacaatagcaacaagaagagaagaaattgactctcaattggtagatttggtaattccccatagtcataggctaaattatttataactactaaatggaccttcttgactgaatcttataaacaccttgctgtattccttctccctaactccatattatttagttcttgactatcgcaatagtaacaacaagctctaaagaaacgagaagagagagaagaggcaaaaatagggagaaaaagaaaaagggagacagagaaaaagagggcagaaaggagagatgtcaaggttagcaatcagtgtccagacactaaatttcatgagacctagcatcttgcatcctagccttggtttaaatgacacctggcatcttgcaccttaacctcaatttggtacaaaatggcaactcacccttatttagctatggcccaaattcagattgaagcagtatgtaattgctaagtgggtttataagtcacaagttacatgctaggaactaaataacctcccattctaaatgtgtaaattttcagaaagtagagatcaggtatatacatatatatatacacacacatacgtacatgcacatacacatatatatacataatttactctaacgaaaccaatgcttcaacatcaataagcaactctgatgacaactcttatcagaaatgtttatgcttggtgatggtgaggctcattgcattgttattcacacaaacactaaactttattcacagttcattcgttagatgaataactgagttgcacacacaggcatgcctcgaccttgaccatttagtgatgggcatgtatggcttctgccaacagagtaagaattttcttaaactattaagaaatattgtgcagcaagagtgccaaaagatttccaacaataagtttaaaagccttttcttgggcagtaagtactgataattaatcatctagtaaactgaagtcaacatttttaataaaaatgtaatatgtcattctcttttttaaaaactggttttgctgatgttttacacaatatttttgtatttttcccctttagtgacaagttatgccttggaaatgattttataagcagaaagttcaaaattctcctgccacgacctggatatgtgaaatataaggaacagaacagatgagactaagcgacctctgtattcccagggcctgttacaggacctcctagtacccagcctaccctcaataaacgaactatatatgatgtgttagaatatatgtgtgaaactaagatgatgtccaaaagatgacaaagagatctacaaggaaggaaggagggaaggaagaaaaggaaggaaggaaggaacgaaggaaggaaggaagggagggagggagggagggagggggctacaagagtacttcttatcctacaatcaaaaattgtaatttgttttataagcaatttgctaatatagcataatcatgattttaatttccctatagagaaacaaatgtaatgccaaatcattgccttgtaaatctgtaaagaaggacctattatatttgcaaatactctcatggtagaatgaccttaaatttcctgtgtctcccctactggattgcttttaacagactgagcaaaaagaacttcagaacatgcctcaccagcaggttatctttgcaccaggagtcctttggccctggtttgttatgcctgggctcaaatagcatgaggaggtctccaaaccactttcaggctctgtcaatgttatcacttcacgttataatgtgattgtgatgacttgaaacaattcaatagcttgttgacacagaatcaacaatattacattgtcaccaactgatacccacgtgtgataaagtggtgttcaggtttctgcacagacatgatgaatttataatgtccccatattaatagcaacatgaataaaattacaagtttatctgcagtgattgccagaaatggaaggaaaaaaagcagggtatatttcctaagattttgcctaatctgtgttttaaatatcattagtaattacagtaaaaacctttgtcactattataaatataaaattttagaattttaatgctaaaaagaagtacggcttcagtaataaactataccagaaaatatatacaataaaatctctactaactgacacacaaataattaaagccatttgcttactggagttttgtttgtattatacttcttacaaaggcaattaaagaaaataaaatgatattagagtgttggtcaagaatagagttttcagtggccatctcaattctgggtgttgggtacctatagttacagtcttggatgagtatgagtgagctaatatgcagaacatggatccataggcattataataattaagtaaaatttaaattaaattcagtaagaatggctaaaataagaataccaatggaaaaagcaatcgccagaaagccaagagatgcatggctttcaactctggcaaagcactgactgtccctgtgtcattccaaactctaagttccatgagggcaggaactgtttgtgtctcatttaccactgaaccttcactcaataaatatttgttactgaactggtttagcttgatgaacctgaatttaaactgatacagtatgcagttttcttacctacaaaatttctgacctgcaaaatcaggttacggtgaggattaaagaggtccctgtaaacctctggcacaatgcctgaagcacagccgtccctccatgaagggtggttccttccagggcattcccactactcatctaattctaacattctaagagttgttcccctactatctgactgagagaaaactttcaaaatctaagccaccttgcttggtaggatgctcaacactgaaagcacagatggtggtggttgcctccactggcccagtcttcggtcaagggcaagagtgaaaatcaagatttattctgagaaacacaggtcaaactagagtcaaaagcaagcttgctcccaacttgctattttcttgtttatgcatttttatgtttattttcttgtttatatatttttgtattttcctacgatgagcatttttattattttgtccattgtaaatcattcatatttcaggtgatcctctggagttttacatgaaatactgtaggtgtataattccatcaccaaaaagaaattgatgataaacatacaggctttcccagaattgaccttaagtcattatactgtacattaaacttggacatcgttatctttctatcatcataaaaggatttctgttgacctcaactcatgccttggcataagccatagaattaaggacataaagaaattgaggattaatcaactgaaaccaagctaaaaagttttccattcaaaaagtttggccagcacagtagcccatgcctgtaaccccagcactttgggaggccatagcaggaggatctcttaagctcaggagtctgtaatcagcatagacagcagagagaaattctgtctcaatagaagaaaaaaaaaggaagttcagcgattctccaggacccacgtttaaaagaatttcaaatttttcctaaaagcatgaaaggccaggtgtggtggattactcccgtaatcccagcactttgggaggccaaggtgggtggatcacttgaagtcaggagttcaagaccagcctggccagcatggcaaaaccccatccctactaaaaatacaaaaaattagccaggcatggtggcatgcacctgtagtcccagctacttgggaggctgagctgggagaatctcctgaacccaggaggcagaagttgcagtgagccaagatagtgccattgcactccagcctgggtgactaagtgagacttcatctcaaaaaaaaaaaaaaaacaagcattaaaagtattcactatcctaattctctaaactttctcttatataacagaagaatgcaataaatgcaaaaatattatttgactaaaataacatacaataatgcctttctaattcattcaaagaaaaactttattatcttaagttgttaccctatttctgtttgaatgagaatagatttccataaacctagacatccagcccctgcaaacgaaggaatgaggccaggcgcagtggctcatgcctgtaatcccagcactttgggaggctgaggcagttggatcactggaggtcaggagttcaacaccagcctgggcaacatggtgaaaccccatctgtactgaaaatacaaaaaaattagccaggcgcggtggcatgcacctgtaatcccagctactcaggaggctgaggcaggagaatcacttgaaaccaggaggcagaggctgcagtgagctgagattggactactacaccccagcctgggtgacagagcaagactccatcacacacacacacacacacacacacacacgcacagaggaatgaaataccccattgccatgaccccactcctattcttttccagtaatgaaacagagagaccttaccaccctccaaagtattctccactgcacagagcaaacactccaaactaaatgcaacgcaacaaacaggtactgaagctctggtagaccatttatctttgtattcttaaggcagaataacacttgtcaggaaacaagccctcttgtccacaaccgtttggctatcctcaagcaagccaataaaactatcccatctccttccagaaaccaagaaactaaagtcagccagttcttccctgggaagagttatgttcactctgtttactataagcactcaacacttcacaaagtttggtgggtaaggttacaaagagggaaaagcaacttaaacttaaaaggctgttctgatagtccaggaatgagacgattagagccttatctagttaaatggtcccacctccgcctgacttcccccaccgctgtctaaaaatcctctccttctctctccctcagatccccatgacatggccagagtttccatggctcacgaccctgaccccaaaaatctgctcccaggtgaacttattcacgggaaggtttgagagattcttaaagccttctacgggtgtttgcactttcagcagaaaacagaagccctccaaggaatgaattttctaattgtggcattttaggcattcctaatgcctacataccttcctcactggcttgatggagcagattgtaggggaacagagtatcttatcagggctcctaacatcgtaccacataggttgtggtaccatgtataaggccatctttgctaatgccagaaacctcatcagcagtgagatagcatttttccataaaagcacaggccagcccaaatacagtcaaagggcttttcaggagaatttggtgacatctctggatcagtgcaatgtattttagattaatctggactgaagaaaaaggccctaaggaaatattgcaaaaacaatgactccaaaggcctcaagagaatccattaacacgtgaacatgattaatgaaacactcatgtgggttctgtttaaactgaaagcccttattctactatttgtaactcaaagaactccttccactggaaacaaaagattcatccattccacccaaagtggaatatatgtgtatgcatgcatgtacatctacatatatgcacacaagacagcccaatattaccaggcttactgatcaagaaacagacttgaggccaggtaaggtagctcacgcctataatcccaacactttgggaggctgaggcaggaggatcgcttgagcccaggagtttgagaccaccctgggcaacatagtgagagccagtatctacaaaaacaaaacaaattaaccaggtgtgatggtgcacacctgtagtcctagctattcaggaggctgaggtgggaggatcgcttgcgcccgggagtttgaagctacagtgagctatgatcatgccactgcactgcactccagcctgactgacagagcaaacccagagcaaaagaaagagaaaaagaaatggggggaagtagggaaggaggaagagagggagtaggggaggagaggaaagaaagaaagagagaaagaaaagaaagaaaagaaaggaagaaggaaggaaggagggaagggaagggaagggagaaagaaaaacaaagaaagaaagagaaagaaagaaagaaaaaaggaaggaagaaagaaagaaagatagaatgtaagagagacagagaaagaaagaaggaaagaaagaaggaaagaaagaaagaaagaaagaaagaaagaaagaaagaaagaaagaaagaaaagaaaagaaaagaaaaaaggaggaagacggagggaggaaaggaaggaaggaaggaaggaaaaagacaagacaagacaatatgcattccagaaggcatgctttatagagtgctcatttggccatgtgtttgtttaccatcactggattaactcaagaagtttcaataaatttgtccacctattgattcaactactgttacatatgaaatcattatttctccaagtataacagtctgtattttccttcttccattctgcccagcatgtctaaaagtcaacagcttttccacagaaggttaagagacaaagtctgaatagccagatgctgcatactactgggaaactactataatattacagaagggcaaggaaggggaagagcacgcgaagactgcttagaagccaagtaactgtccagggtgaagtccttctagtcatatactagggattcaaaccactgctccacctcttactaactatctgacagccattttaatttctgtgcctcagtttcctcatctaaaaacggagataataagagctcttactcataacattaatatgagggtagagtgaggattatgggtctggcatatcagtaagtgtttaataaaaattgattactgatactatttttaggccagtgttttctgatcctttaaactccaaatattgtctccctctcaattctacagggttttttttttgcttcttatatatttgcttatatgagagtttatgtatatatatagctcttctatattcatcatctgcaacccagtttgaaaatctattaaaataacctaattatgtagctaattcccccaaaagctaatttaatacagaaatttgagtattttattattacttttattttacattattacttctcttcccaactaaatctttctgatgtctaagattcacaaaacaacaacatatccatattcaaagtaaaactgaactagaaaaataaaacttaattcacaaagtcaagtttataggcacacatctattccacatgcgttcaaaaatatatcactacttagtgaaataaattaactctttgctaaattatttctctggttgatactagctgtgtttttaagacattttcaacaattatatttcaagggtgtttaagaaatttagtaataattaaaaaatacatgcttaactaaataacactaaccagttgcctaaacatagctatcttaatccaaagaagttgatagtgacaatatttattgaatcactgagttgtacaatatagaattactaacccctgttattagtatctacaattttaaaattctcctcacttcactctgataaatttggaaattgtttctgacttgatgatattttgaaaaacgccaagcatgggggaaacatagagaccacatctcacaaaaggaaaagtccaaagcttttcaaaatgcagactgctaagggtgttatcaccatagcaaccctcagtaaagagaattccaatatgaagtaaccagagaataagcaatattttaacctcaaaagcacaaacttatggatacatctatatggtatgcatctgtactatataaggtcaaaggttaaaagtgaccctaaagtcaaattccagcattcttttggtgcatacgatatatctacaatttctttcccatctcttagagtcatttagagtaagttttatccttcttcatataatagttcctcaaatatttggagagctaaccattgttcccctattctcttgtccaaaagaaacatctccagtttttccatcattcccccataatattgtttccagttttctcatcattcttgtttctctctttcaaataaggttcaaattttctatgcctctcccaaaatgtggtattcaaagctgaagagaagatgtgcagtgtcacccgaccagctttggccaggagcagtcatggcatactttaacattcatttgcctctctctcctcagtaatagaacccagtgttactcaggtgaactatgtgctgagctaaaaagctacattttccaaacttcagccaaatgtgatcataggactaagtcttaatcgatgagatcaaatgcaagcagtagtgttgtgtgggacttctggaaagtctcctttaaacagagaaggcatgtcctcctttctccttctgcaatcccactacctggcatagagaaaggatggctatggctacagcagccattttggacaatgaggtgacttcaggaatgggagtcaccagcagaggactgtggagcctgtgtctctaatggtatcatggaaccaccagaccagccttccactgctggttatgtaagagagaattaaatgtttgtcttgttcaagccaaacaaaatcctctctgcgacaggagcccagagtagagcatgcctattacctccccaccatgatggagttgctttactataacacatgctgttcttttgactttctattaaacaaaaatttcttgagtgcatgcttatgcctgacactgtgccagacacaagagaccagaggagctaggcatactcttagcatcagtggtcctgttctatgcctctcccaaaaggtggtactcttctagaggaagagataaaatacatacacaaatgattgtatctcatggcatgaggagacatgctgtaagagaggttcagataacattcagtggatatcaagaaaggtcctgtagagaaaggtgcatttaagctacagatagatggatctgaggggaggggacgcctcacagaggaaacaaactagaactggcacagaaacagggaagtgcaaggcatgtccaagaaaaagtcacattcttcatcaatgtcactggcacgtcttcaaattacaaagatcatacgtgaggcagattctcttttatgtgaagtaaaaaaaaattaaaattaaaattaaaataaatttgcaagatctttgacaccctctaaagacactaagtgcctccagagtcaattcaattccccaggcatttatggagcaccaactgtttttccatcaaataagagtttcttccaatctacaaaggcatcctaattttaaaaaaatttcatcaaatattttccatatttttaaaaatgcttggaggcgataacttgtcaatattctactaaactggcagaaatgtttccaggaggtatattctgatatttaacaaactgtaaagcacaaagcaagtgtggttctccttttcctcttattattaatttaaagttacaagaaagtaaagcatgtggaaaaacagagtattagagttaagtatgtgaggcccagagccaaatatcctactctgcctcagttcactcattagtaaaaagggaatagtaatggtatctacctccctggagtgtcacaagaacaaatgctatagctatggtgactatatatcaggcatataataagtttcagtgtatgaccgctcttattaccaatagcatccctttctgcctctctattcacttcctatcaaccaagatgggccctcaacaaaagaactattggcatttaagcccagacaattctttgtagtatggaactatcctgtgtattgcaacggtttagcattcctgtcctctgccctctaaatgctggcagggatactcaggcattgtgacaatcaaaaaatgctactatatgtttccaaaggttccctgagggagatgaaccaactaggaatcagtgaactaaaacaaagaaaatgtcacacgctatgcccagacagacagcaagctggaaatttttcaggcaggaaaattaaaaaaaaaaaaaaagttgaatatttatgaatgtaattaacatacacatacattgaaaagacatgtctaatattcccataaataaaacatgccaacttataaaacaaataacaagaattatcaaaaacggcaacaaataaaagctttctctttgttccatggtgactctctccttttctcatcacttccaagtgcacaagtctagttctaccctcatcatctgtcacccagataatcccagtaatcctctaacttaactagttcatctgctttctctcattgcagcaagtattctttttacaaaatgaaaatctgagcattgtacttcccagcttacatttcttcaaaggcaccaaacttcttagcttgacatacaaaatcctccacagtccactctcccaactccttcaagactcagttcaaatggcaatctgtgcggtcttccttggcccttggtcctctcaggtctagttgactacatcactgccttttctgtgctcccaaacttctattatagacctctcaccctgtagcacaattgtttatttgcatgtcttattcatctatgcatgtcagttcctgataaaaaaaaagcttgcaataaacgtgtgtgaaagaaatacatcagtgattattttaactgtaattattaaccaagtctagcttgacagctttctcacctattgaacatctcactgacctttctgtagtttcatgaaataataaggaacttttgcaagagagaaaactcttcattgactgtgattcttacatgctctgtctaaaacctctcacaaaatcaagtgctcctcttcaagtgtagtcttccctgggcaaatccttctccttgcccagaggacacatctgacctccactcagacccatgcttccatcattcctgttctcagagttacagagacatcatcagcaagttctgcataaaaccaagttacagaaagcatgcacaggacacctaaaatggaaacaccaggtccaccaacgtttgaacttcttggcaactttacatttggatctgtgccttcaagacctgggaggtgaagaaccaaacattcttgggggaagaaaggcaggtgaccaggcctgtcttccaacatttttttgtctagtagtttcatctgctttaaaaagctgtatttttccccagcaatttctatggatagagaatttgacaagtggtttctttatttcaaaaaatcacagcatggtggctgctttgctgcatgacctaaccaagagctggtcaactatgaatgatttaatatcaggttccctgtggggccaaatgtttactgaatgctcaccaagtgccaggaccttgcatgttcacaatatcctttaaatattcccaggtacctataaggtagaaattactaacacccattgtatagtccaggaaactgaagctcagagagcttcagaggtacacatctggaaagcagtcgagctaaatctctgagctgtgattccagaccatgtcccagtaccagaaagggtttggccacaggttaactatgtccagggaagttgggaaggggtagttggggtatggccagaaagcttctataataataggaagagcccagaattttgcttggcagccagtgatttaaatttacaacagtggcttcagctcagtttcacaatttaatctatccttaataccttaaaggaagccatagaaattttctctttataaaatgtgagaatagcatagaatttttgcaaatacataaatatttactaactcctcaaaagttattcaagatgccaaatatcccttcttgaagaaaccataaataaacctatatcatctgtcctacagtgaaaatcctcagagaatgcaatggcatattcaggggcataggatatggttttataattttccagctcatatttctttctttttttattattattatactttaagttctggggtacatgtgcagaacgtgcaggtttgttacataagcatgcacatgccatggtggtttgctgcacccatcaacccgtcatctacactaggtatttctcctaatgctatccctcccctagccccccaacccccagcaggccccagtgtgtgatgctcccctccctgtgtccatgtgttctcattgttcaactcccacttatgagtgagaacctgtgatgtttggttttctgttcttgtgttagtttatccagctcatatttcattggagacaaagacataataaagttatgtaagcagggaagagaattttcaattataaagattctaaaaagtaacaacattttagttgtatatttgtatggtatttttaatgcaatcaagctttacaaatgaatgcagtcaatatatcccaatattttgtgaaattccctctaaatagagcatgtaagacatccattaaagtttatttttagctaagagccaaaccctgtttcattttattatatccctcatcgagttttaacttagaaaacataaataaaacaagacattaagtgacttaataataaaagcttatcctagagtgtgtttcaggattgctttctacacccacccccaactactgctctcactaaatcattctttccaaatgtgctgagatgaaggagcaaaggtgtccttaagcctgacttttccttaaaaccatatattaaaagtttccctggtgtgctcctctcaaactaaaactggcttatgattaagagcaagagtggcaggcagtgactgagatgagaaggaaacactctaatttgtcatcaaaaaaataaatcagaaaatagcctttaatcttaagagtacaatttactgatttagtcatttatttacaaaattgatggaaattgttaacaaggagttaattgatttaagtcacctgattaccacagttaattaaccacactgacttaatcttctttgaaaacatcaactaatcatttcccaggtgtcaaggggtaaatcgttaaataaaaaataaacctctgtcctcctcttcaagagagatttcttgagtgtgttttctttacggattccaatctagccacaagccaagtttggggaaattttgttcttatatgactatactgaaagagctgccttctttccagaattttttctccgttatagtaaaggaaaggcagccttgcaagcttaccgtgagtgtcattttgaattacttcaaaaatgagcaaggaacactgcgtaaataaaaatgaacaaataaaaggcaacagagacattcatctgggaaggtcagttttcaaaaaaggaacttaaaacacactttattgggagggtgtggccacaaaggagtagcacaagggagttagtgggggtgattgaactgttctaatcccgaatgaggttgtggctacacaaatatatacatgcactaacatttacagaactgtgcacacacacagcaattttagcctatgttaatttttaaaattaaagcacttcataaaggccgattctcttttttacagatagaaaaatggaggtttgaccccttggccccacctcaaaaggaaaagagggggcggtcaaaaaaaaaaaaaaaaacgagcactgttagagaaactcagaaaaacatcctacatgactcttgtcgttcttgttctgagttagcagaaccactgcttctctccaaaaacaaaacaaaacaaaacaaaacaaaagtcaattgtctttgatccaccaatgtgcccatagaacaggaaggccctggagggaatcaaagtcccaggtcactgtgacaagtcacacttagacctcctaaagggaagaagtaactacagctttaataaaactccatcctcttcctatccctttctccttccttcaatcacagcaaaatgcttgaaaaataaatctggattacagtgggattttgttgcacatattcacaatcagcaacaactattaaagacccttttgatttcccttacagggaaacgaaagtgttcaatacaatatgatccttcttagcccaagtccctcttggtgccatgttctctcgtctgcactgttgggtttaattatttacagcaagaagcatctaacttccactgtctttcagttagtatgttcaatttttaaaccatgcattttgtttttcactagaatcttagctttcaatgattacttagcaaattctttcaacacttcactgaaccaaatattagggaagaagtaaattcttatatcagaagtgaccttgaaaaaaaaatgcagaattttggtacataaaaaccaatcatttgacaattgacttgggacatgtgtatattcaattttatgcatttgcaaattctttttttattacacagtaactttaaagaaaaacagagctaggcacagtggcacacaccttagtcccagctattcaggaggctgaggcaggagggttacttgagcctaggagtttgaatccagcctgggcaacatagtgagacccccatctctaaatttttttaaaaatagaaaaacaggattccctattaatagtaatcattatggtctagacaaattataactgccatgtatattaaaatccaagggtctcttctcaaacttaccaggcactgatgaatccccaaggaatggttgatggagtcttgcaactgtgttgcttttaacgacaacttttccttttgttgtaacaactcagtttcaattgctaactagaggaaggacagccatactagaagcttttaagttctatctttgaggccttcctaatagatcacagctgaaattccccataaagccattctaagaaaaagcacaagcataataaccctttattccccagaaaaggaagttggcttattttcaagactatatcacacctctagtaccttctttccctctttcatccccattaaaacataccagctttgtgtctccttctctctgaaccttgctctgacaaacatttactgtgcattactatctcaactaactactttaccctacaggagtgaacatttccacattgtaataggagtttcaggaggaaagaatgtcttactccgaagaactgactttagtaatgacagagcagagatctttggccgtagtgagagatactttgggaccaagagacctttaagcacatccagcacataggaaatgtcttctccatctctacaacagcagtgttctccgggaagtaaagaaactcagctctcacttggttgttcatttttttcttcagtgactttaaataagagaacttaataatttttttcattagtagtaaacaacaacaacctctgaaaatttatagatgactgctgtccctaacggaaggttaaaattgaactctctgattaggtaagggtcctttgaattaaaagacacataattatagagggaaaaaaaaaaaaggtgttcccagataatgaaatagtaatataggagaaacccagcagagagaaatcaatccgtacctaaaaagtacagtcttctagtcttctagaaggaagtggaaatatactctgttcaatagtaagttgttttggatgtggcctatgttgaaggtctctgtctatactctgcagtacctagttacatcacgcctagagcatgataaggctgcaacatatattgaatgaatgaatgaatgaatgaactgccaagagtagcaaaaaaatgtccaaaagttgggtcgcaatggtaccagcctctgaaatgaggtcatctgatcataatatgagaaattaaatgaggcttcatttgattacgtacagaggactatcttccacttgctccaaattatccatggtgacaacatatacaaataagggttctgggttcaaatgttggctctgccacttagtaactgaattgctttgggcaaattacctcacctgtcattgtcttggtcctttatccataaaatttttactgttactacataagtaggtaaactaatacctacaaaacacttaggccaatgcctggtatagaaagcactcaaataatttagtcacttttattgtggcttatttcccaacttctctactcatctatgtgtggaattccatcattctcctgcctccaacctatttgttacgtatggagtcctcaaaagaatggggactgagatgagggagactatgcccaggagacaagtggccatgggtccttttcagcagtcaggggccctcttcgtctgtgcccatttttccttcattcatcaggaacaagacccatgaatgtcctgacttgacatgtgatgttctttccaccacaatccatgctgcctccctgagtggagaaaccactcccctcttcaaagagggccttttgtttgatcaaggctgttttcactgtgtcatggtctcagacagctttcttttgtgttctgtttaaatacagaatgacagtccactaacacgaagtctaaaaactttggcttatctttttgtaaaagctactgtatcaaatctgtcctaaaaatagcagaatgacccattctgtatgtacaggggaattctcacagggtaaccaagtatctgggatggaagttaaaaagaaggatgcagattcaactactcaaatgcattgggaatcaccagcagggcgggagtgggaggcactggggtggagaaaaggggggagtcagatcgagagaaacagcgttgctaagccacttgctttgatagagacagcaattttcctttttctccatcaggaccttgactgggcctccaggggcctcgaggaattaagggctggtagtaccagggaatggtgatgagctgaggatgccccttcttagcacccatggtgacatctgtccattcatttattcaatgtatattcatttatttagcccttttctggacactagggaaagcaatggataaaagagatgaaaatccctgcccttgtgccatttacatcttagggaagggaagataataagtaaggaaataaacaaacaactaactaagttacataccttatgtcagatggtggtaagcgcaatggagaaagtaaatcaggaaagaagaggtcgggaaagaatcagagaaggccacactgagagggtgacctatgagcaaagacctgtaggaggaaaggaagtaagtcatgcaccatctgaggcaagagcatttaggaaaaaggggggcaagtgcaaaggcccaaaagtgctcaccatgtcagggaaaacaaggatatcactgtgcctggtgcactgtgcatggggagaggagaaggaaatgaggtcagggaggtgatgtgaaggccaaatggttagggtcttgtagatcatagtaaggacttggactttgactcttcatgagatgggaagcagtggtacacccagagttgtgccatgcagcttccccttataggaaggaccagctatgaggaaggactttcttcctgcaatcagctcctttggggtctgcctcagctatagaaagccacctgcccaaggtcgtgtccttccaggacaggccacatccagtgattaagcaaggccatttcagcctgacataggacactctaacaggcaactcttgctccagagcttcctctgggttgaccaacagctgccagagttcaacttcttcttctgcccatcctgcttcctccctttcccttcacacgcattgatcttaataaatattatatactccaagctccatctcagtgtctgtttttgggcaacccaacttgagtatgacagaaaccatgggagcttctgagcagaggggtgctgtgatctgactgatgttctaaaaaagttgctacagcaaggaaatcagtatggaagccattgcaatcgtcgaggcaagagagggcagtcggttgaatcagggtggcagaagtgaagatggtgaaaagtagttggattctagatgtattttgaagatcaaaacaatgggattttctaaggaattctatatggggtagaggagcaaaagaaaagtcaaagtaggatacagtttgaggcttgagcaaggatgaggaagccatttgctgagatgagaaattccacatggaaagcaagtttggacattagtggagatcaggagttcaatttcagacatgtgaagtctgagatgactattggccagccaggtggacatgtcaaatgagcagttggatatgtgggtctagactatagggtagtggtctggattagattcataaatttgaaagttgtcagcatgtacatggtaaagaagtatatatggagtcctcaaaagtatggggactgaggccaggcacagtggttcatgcctgtaatttgagaggccgagggaggaggatgacttgaggtcaggagtttgagaccagcctgaccagcatggcaaaaccccatctctacaaaaatacaaaaattagccaggcatggtggtgtgcacctgtaatcccagtttacttgggaggctgaggcaggagaatcgcttgaacctgggaggcagaggttgcagtgagccaagatcacgcctctgcactccagcctgggtgacagagcgagactccatcgcaaaaaaaaaaaaaaaaaaaaaaagtggggactcagatgacagagactatccccagaggacaagtggccctgggtccttttcagcagcctggggccctctttggttgtgcctatttttccttctttcttcaggaacaagatccatgaatgtcctgacttgacatgtgatgttctttccaccagagtccatgccgcctccctgaattgggaaaccactccctgcttcaaagagggccatgagacaggatgaggccaccaaggaggcagtgtagctagagatgaaaacaggtcagggatatagacaggaacaagcatgagataccaagggtaggccagcaaggaagaaaagaaaccaggagaaggcagtttcttgaaaatctaactaagtgtttcaaggaggaagtcaggatacactgtgtgtgatgctgctaaccagttaaataaggaccagagctgaaaatagatcattggatttaacaacatggaagtcatgagtgactttgaccaaaaaaatatctatcaaggatgagggctaaagcaaaatggcatggatttgagaaaaaattgaaaggtaattacagtggatataggcacatctgtacaagaattttactgtaaagtggaaccgaaaaaatagagtgatagttagaaggtaatgtggaacagaggatttcataaaagaaagaggggacaattgcagagaggtgagagggaatgagatctagaacatgaatgaaatggttggacttaagaactgggaaaattcttccagagtaataggaggaaagacagaagatataagacgaagttcaaatgatgatggttgagttatagaagtttatggaattctcttctggttgcttccattttcacagttttaaaaagctcactctacatgtgagaaggtgatgtcagaggtttgaggaaagaggagaagatataaggaagcaagagaggcaatagacagactaggaagcaagtcctaagcttgagattggcttcatgaatgtcaagcgaggctagtcagtatagttgtgtttttctcctgccatgtttagctacagagttgcagatgtggagaactggatttaaccaggatcagggccttgccaagcacaacagagccagataaaggggccaagctgctgagcgcgtatgtatgcagggaagtgaaattaatgatggccataaaatataagctgaggaagtaaataggtgagggatttgagggatggtgaagaggcggtaggatcaacaaactgtaagtcccaatgaggtcaacaaagagttgaggctgggatacaaaggaaatgagccatgaagtttttcaatacttccattccaagcatggaacagacagcttctctagaagccagtgggctgtgtcaggggtgttctgagatgaattcagattcaggtgagaaaagattagaagacctgcaacagttatttacctcaatgaatccaacgttcttaggagggtctggggggaacttcaaaggtgaccaaggtaagaacaaaacatacaattaagacacaaacagtggcatatttagggagaggttcaggacctgccatgctggccaaaaaaggaggtggccaggaatgagggtagtacttcatgtcaccctcagacttaaaagagtcctgtccttcttgttgtagctagcttgtaacattcccatccaaaagaaagagatttaacagagtatatttaactgccactgaagaaatttgcagtggtaagtcagttcacctctaagtctgtttacaaaactgaaaaatgagagggtacctagatcacacgttcccaaaaattggtccagccctcagaatcaccttgaaacttttaaaaatacagattttccacattttctttatctagtctatcactgatgggcatttgggttggttgtggcacatatgcaccatggaataatatgcagccataaaaaggaatgagttcatgtcatttgcagggacatgaatgacgctggaagccatcattctcagcaaactaacataggaacagaaaaccaaacaccgcatgttctcactcataagtgggagatgaacaatgagaacacatggtcacaggggggggaacatcacacacagagaggggaacatcacacaccggggcctgtcagggggtgggggccaagggaagggagagcattaggacaaatacctaatgcatgtgagccttaaaacctagatgaaaggttgataggtacagcaaaccaccatggcacatgtatacctatgtaacaaacctgcacattctgcatatgtatcccagaactgaaagtaaaataaaataaaatttttaaaaaacacagattttcatacccctgctttagtaagggtgagttttgatttaagaatctctatacttttttaagttcctcaggtgattttgatgatatgtcaagtttggggagctagctgactttgtctagggtccttagaaattctaacaatctgtaagttattgtgatgaaataatacttttgagaacataactaaaaccttctcaaagttggattccccctggataggatcaaggaaacacgtagccccatttgccctggcagccatatcagaatcatatgggaagccagaccgcacacaaaggtgaaacttaggggggagtagggtcaaggaaaacacaaagaaagagaactggagccctgactgcacctcgcctgaaccccactctgcctcagtattttttactcacataagccaagaaataccctttattgtgtaggccattttgagttgggttttctgtttcttgcaacaaaaagtattctccacacccttccccacatcaaaattaaaccagtgtggaagtacatgctagcatgtatcaccccccttctagtgagattaaaatgtgggtaggattgccatatttctgataaaatactttcattcttaaattcaactttaagaatttcctgacaaaataaatgatttcagccgggcatggtggctagcgcctataatcccagcactttgggaagctgaggcgggaggatcacttgagctcaggggtttgaggccagcctgaacaacatggagaaacctcatctctacaaaaaatataaaaattaactgtgagtgctggtatgtgtctgtagtcccagcttcttgtggggttaagcggagaggatctcttcagcctgggaagttgaggctgcagggagccatgcactccagcctgagtgataaagtgagaccctctctggcctgggtgataaagtaagaccttgtctcaaaaaataaaaataaacgattttgattttttcaacctttactcaggaaattttctccttgttaatgacataaaaaccaaagaactgggcccaaagtgacaagcaaatcactgacagtataagacagaatatttttatagaggaatccaagaatgtccagcataacagaagtgtagctactttccttttcgtctttttcaggtttcctcaacaccttcaaaagtacacatgctcttacttaatgtgaatcagtagatcagtgaggaaagacttattttcaaagttaccaggaatcttcatgtgttattcgctgatagtacataaatttaaaggagaccttggatattgcttacaaacttggatctcaagatctggacaataaatgcgccattgtatccatggtaacagtggctcaactattcaatgcacagaatggtaattacatttcctcctttcattcatttctcactgtttccagtaaccttgaggtcaggcatgacctgagggctaatgaccaaaagtgaaacttcaaattgtctaatctgtcattatctaggaaagacttacatttctttgcactgaatttcagtgctatcctaaatcagaagtgtcctaatataaaagttaaccatcttatttttagaatgataatgtctccattttctcagctaatgtgattagagataagacttaaattagagaccaacaaagtaaccatcagcaaagagtacatatatctggcatttctgaattaatccaataaggtgtgatggatacgtgttctaccatttatgaaagaagtccatagatgaagtgctaaggacactcagatgtgcaccaagatgtgttctgtctccacagaagcatcttaacctgtctgcaaactctttaagcttctttctctctaccccatccttatagcaaaggactagtgcttggaaaacagacaaactcttaggaacataaacattggagtgaagtaaattggaaaaggagtaggagcctaagattcacagaaaaatgaaatactgcaccagacttaagggatcctgtagtctgatcgctcagctcattttccagaactttcctgtctatcacaaagctctgctccaaataagaaaactttaggatccaaataaaccttctaaaagtccttctttctcctgttctccttctaaacttaaagttgcaacatggtcacatgggcacagatcaccatgtcttttttcttaatgtttccaatactttattcctttcaattctgtaagttaccccagggctgccagctcttgagaaatttctgtagctttttcaagtgtgtcttcacatacaaaatgaaaataacatcgtcagtcaattttatctgataaggtatactgaacacctgttatttttgcatcccagcctctgttcaccattctcccaataattacccccatttctctctggactccaccccttcatacatgatctcaaagactgagtatacagcccaagcctaagccatgggaacacatcatgacccgggattcagtggttggttctccaatgagtttatgacctaagtagagaccctgagatgcaactgaaacttttgctgggaatagctaagataaaaactctttttctttcccagtggatgtgatctgataggaggtggctccagagccactgacagccgctttacatcaaaggagaacatgtttaagaatggagtcatctcagagccaggagacggaaaaaagacaagattggcctgacatagtttgagcctccattttatattaggttgaaccaaatgaaattgccaatatttgactatttctgcataggaaaaaaaatcaatctcaaatggatcaacctaattatctgtatcttttcaactatgtatttattttctttgagacagggtctcactctgtcgctgaggctggagtgcagtggcatgatcacagctcactgtagcctcgacctcctgggctcaagcgatcatctcacctcagcctcccaagtagctgggaccacaagggcacaccaccattcctggctaattttttgtattttttgtagagatggagtctcactatgttgcccaggctggtctcaaactcctaggctcaagcaatccgctcacctcagactcccaaagtgctgagatttataggcatgagccaccacacccagcctcaactatgtatttcaataaccttccttttttgcctcagacagtttaacttagttttgtgacattcaccaacataacagtactgaataacatgtgaagttgtggtagccactgtaaggatgtaacaacatgcacaggtgcatcattctcagacccacggtaaagaagataccaaaatactgcaacatcttcctcctctcaagtttggaaaaagtaaaattctcgtattgggtaataatgatgaatggaaatctatatgagacttcacagtttattaaacatttcacattcattgcctttgcataaccaccccgtgaggtagatatatgtccattttacagataagaaaactgccccagagcacccagcatgtgtggtactggatttcccagataataaatggcagaggtaggaatcaaaccaagatcctccaacttcaaaatcacaagcccttcccacttcatctcaaaacactgtaactgtcaagaaattacttcggaaacatttgcattaggaacatgtgaagaaccacagaaatgctcttgacatttcaaaacaactactagctgatcattatcaagaagcatcccagaactcggatgctgaaacatctccaatctttctaatgctggtgagatcctgggcagggttattaggaatgagtcaatgactatttcagaatcttaaatgcaaaactgcagtccattttaattgcgagatatgtagacacctcttttcagttctcatcttccttaatgtttctgtagtattgatactattgactcatcagcacactgttgatatttaataaatattcatggaaaaaataaaataaacattcacagaatacacaatagtggtaaaaatttttaattactcaagactataaagttaataggatacgatagaaccatttgatttataccaaaggttccatcaagcttattttttccatgctagaatagggcttcacaattagtatttttttagttgctctagattcgtgcagtcaaccttgagaacccctttcctatccattcaacactctttcataagcaccttctactttcttttcttttttttttcttttttatttatttttattttattttattttattttattttattttattttattttattttattttatttttgagacagattcttgctctgtcacccaggctggagtgcagtggcacaatctcagctcactgcaatccctgcctcctgtgttcaagcagttctcctgcctcagcctcccgagtagctgggattacaggtgtgcgtcaccacgcccagctaatttttgtgttttaaatagaaacagggtttcaccatgttggccaggcaggtctcgatctcctgacctcatgatcctcccgcctcagcatcccaaagtgctgggattacaggcatgagcccccacgcccagctcagcaccttctactttctacttaccttgttctagctactaggacttaacagaaactccaaagccaatatgacaatgcacttgcttctgattacacaggaaatacatctaggttcctggtatcattatttttaaatgataatttaaaattttaatttaaatattttaaaaacctttcagtgttcttacagtgcctgactagagaacatgaacaatgattatgacctaataattacctttagtaagactgaaaacctagtcttacagcagcctgcactacaaaacccaaagatcttcaggaatgcgctttgatggctcaagaatttgaaaaatggatctggaggtatggtctttgggagtaggggcactgacatggcatcagttctggaccaagctgaaagcgcatggtacatggttgtaataacctatcacaggattcctctttggccagggacaggtaacccatccaattgtttttaagattcatctgcttatcagactgtgccttatctggcaagtcaggattccaaaaggaatctagaaatctcaaccaaccaaacaggctggggacattcagaaggcatgaatctaaaaaatggtccactgcaaatttatatcttagctctgtcacaggctagatgtccttaggcaagaaacctattaaccgccttccctttcatcctctcagcccctttcttctccctcctgggctaattgcttatctgtaagaaaaaaaaaatgcaagcagaccagttgatatctaaggttccctctagctgtaaaaagtctgagtttctattaaaatgagacaggtgcatgactgaagggagttcaggcagaagtcttatgaagactggtaaagagaaactttttcaagtagagaaagagaagccaacaactgtgaaattaaagcagcagtgaggttccagagttgtgatggaataaaaacgatacaagtttgctattgcccccacaatccttttaaacatataaacttcatgtgaagatgtaattgtcataaaagctgatactaactcttaaaaacattaccacatttttattggattaaagaatataatgttggaccaggtaaggtggctcctgcctataatgtcagcactttgggaagcagaggtaggaggatcatttgaggccaagagttcaagaccagcctgggcaacacagtgagaccccatttctatttttgaaaaataagtttttttaattagtaaacagaatacaactttgtttaaggccaatacgattttctcaaaaaaaaaaaaaaaaaagaaaaaatcttccaatcacatgctagggtctgagaagtcttcagagaactgttagtgaaaaatgcttaaagaagactttcctttgtatatttgaaaattggaaatggaaataggaataggaagcaaaacaatatgttactttaagggttgataaatataataaaaatattgtatttttagattattttctagtttattttcactgtctatatgctttacaccatgctaagcacttggcatattttatctctttatgcttacaagatgtcattgggtaaattctcttattatcttgtcaattttgcagataagccatctgagctatgcaaagttggttgactttcccaaggtcacacagctagaaagtggtaaagccaatgttggaacccaacagcttgactcgagttcagactctgcaaaatgttttttcttgaaaagcattacacaaaagataaggaaaatgcaaataatttttaacaacagatgtggtataatttttttcaaagactaaacatagaatactcagagctcttttttttcccctccaatttttagtgatgcgaagtttgcaatggtagcctacctaaaaggtagtgcttaaataaaggctgttacaatctcattggattttacttcatatattaagtcaggatcattacaacaggattctagaaatctcaacgtatcaggcagaggacattcagaggaaatgcgtcttaaaatgatcaagtaggaagactgggaatggggagacttgggttctggtcttagaaacctgaggagagattctggaaaaagatccacagttatgaagcagcaggtggtacgagttgcatattgcccctcagcttctttgggaacctcaaacatggacagtaagttagggagcatgacattttttgtacaaaagaaaaaagagaaatcgggccaggtgcagtggctcacacctgtaatcctagcactttgggaggcctaggcgggcagatcacttgaggtcaggagttcaagactggcctggccaacatagcaaaaccctgcctctactaaaaatacaaaatattagctgggcatggtgccccgggcttgtagtcccagctacttgggaggctgaggtgtgaggatcgcttgaacctgggaggcagaggttgcagtgagccgagattgcaccactgcactccagcctgggtgacagagcgagattctgtctctctcaaaaaaaaaaaaaaaaaaaagagagagagagagagagaaaaccagacactgtatactgtagcaattatagactctgaattcagaatcccttgagtttgccattttctagcagtatgaactgagacaaattactgaattgttctgtgcctccactttctcatctgtaaaacagtgataataagagtacttacttccaagggatattatgaagattaattgagtcaataagtataaagtgcttagaacaaagcctgccacatatatgtgtatgctaggttactattactatacacattattattatatattattatcatagaatggaagatggatgggtgcaaaaaactatcaagaagagtaggtattggttatttagtgactaaatcatcaacccaggaaaaagaatatctgttttggttgtacaaggacatagatgaatcaaggtaagatttccttttgccaggcactgacaggaacatatagtaaatcctatagctatatttaggacatgagatacaaccctaagcattgtgcaaactctgcacaataataataaaccctctttctgcgttaccaacactgagaaagggtgttcaaaggaaggttattaatgatctctccttgcctctcctgcctttctgaagacttttgcaagacctgtggggtttgttagggtttccaaacttcttcccaggaagtctgaaatgggtgctgctaggagttgctgtataattacttacttgattccctctaaggagcttacgctaagaattgaggaaagaaagcagattaaccatttgaatacatgccacggcccatccacaagccctcccctcactcctccgtaaatgggggcttccacattccccacccatcaaccccaatatgtgatccaggaaaatcaatttattgctttggctaatcctacaacaataggggtttcattttcattgtagggcaattaagttgtccgacgggagggaaggagcaggaggggaaaggggggactctcccatccccacagacagattagtccctgcggtggcagcagcgtcccctctgtctgtctggtggtcggtcacacgcagctcccggctgctacctagcaacgcaaagccagggggagagctcgccggttccagcctcctcctcgcccttcccattcatcctcggccgggtctctgtctctctgtctctctctgtctctctctgtctctctctgtctctctctctctctctctctctctccctctctctctctctctctgtctctctcctctctctcctctctctctctcttctcccgccccagtcgttctcttccctccttctttccttattcctatttgcttctcttacgctctctcctcttcccttcttactagttttattctctccgcttctttctccctctctttccctcttctctgtttctgttaaaacataaactatcggacaacttgagagaagtttaaagcacttcatactagaaactttctgcattcgatccccaaaactctggccatgcagacgggccccattcatcaacacaaaagcccccagctcccagctggaaaggaaaacttcaagaaaagactccagtccctcagccactctctcggccaatcccacctcccggccttatcttggctcgtaaatgatctgtatggtgagagcggtctctgggggtcaccgcgggaccaagtttcgccggtggtgggaggagtgctctggcccgcggccctgggcgcgcgaagggatcccgggaggggcgctgcaggtggaaagctgcgctctgagcagagcccgggaccgcgccgcccagcagagaactccgctagggagggcaggctgcaaacggcggagaacctcgttctcccgcaaagtgctttccaggagcatcggaccaacgcccgtgggaacaaagacagggtctccgtggggtgcgctgtcaccgaaactggcggggctgctttctcaagtttgctgccgctcagttcctggcgagcgaagaggggcgctcccgctccggcttcgcgaagcaacctgagcgccccaccgggagcagctcccgcgccgccgcccggccctagcccctgcccggacgctctcccctccggcctcccgcggacccgaccctgccacagccggggaagtgggggctccacgagaggctctggctgggctcttaccttggccactggccggcgctaggcaggcgacgagagccaggagcagcgtgcacgccactgctgccggcccgcgatccatctccgcgacggtccccggcctcgccgttccttccccgggaggtgggcgcgcgtagcacaccgcaccggcagcgcctctgctagcgaacgctcctttaggtctgcacctccgccagctcctagtggccaaaagcctgcccccacgcccgaggcatcccgttttctacccgcgccagtccccaccctccagacagtgcataaagccctttagacccgaccgccccggaacaagcatgcgggaatccagcgggcaggccccctgccgcccggcccgccccctgcactttgcagcgcggggaggagtgggcactcgaacacacgcgtgctcacacagggacactcacacaggcgtgtgcacactcacacacgcactcatacaggcgcatgcactcctaagtgtcacaccaactgacacagattcactcatacacgccagtcacacacgcgcgcacattccacagtcacacttcaacgccgacatacacagtcccctttacgcgtgcatacaagagcacactcctgtgcgcacactctcacaggcacactcacacgtgcacacgcgctgccctcgcctctccgcagggtttgccccgcacagaagccggcgaggcggctcacggggaaatctgcacggacgcagttttactaaatgagcaatggaaagaaatggacgaggaggaaagtcaagaatagagaagagaaagaaaaaataagaaatggaaaaggaaagcacaaccagacaagtaaaaatgaaggaaagagaaagaaagggaaagaggcgggggtagggaagggaaggagtaaagagcctgctggatggagatctgtgaccttcattcctggcctgatctctctaggctccttcggatatcttggtttcccctgataggatacaggctgctgagatggggtgctttgtgtttttacaaattagagagggaggtggatctttgttggggaggttggatccttatttagcaattattcagcaccacatctacaggtgtcatggccagatcgtgcttcttacaagtctgctcattttgaagcaaaattgaaaaagagcgaacgtcttctccatggttccggtacccttttataagaaggagaaacacgagaggttcagggaacccctagcctcccttctttggggccgctttggacaggctggcaaggggcccggaagccaaaagcacaagtggccttacacccgccctcagcgcacgtcctcagcctgtacgtgacatcagagcccacagggaggggtaaaaaaggagggttgatgcaagttatttcccggtggtgggaaccctgtgtgagaaggggctgtttgcgggcctgaggccatcccatcatctccagctccagcccctgaaccagcgcggcagctagtcccaggctccggatcctggtccaagaagtcaggagccctttccctccagcgaaggggccgtgacgcatggaggagacagccctgaacgcacgtggtcgctggacaggttcccgctgcctcccttccccaggggcgagaacctgccaattactgccagcccctttccccggggcacaggtcgtccggggctctgctgaccccaacagtccggatcgcgtagcttccgtgggctgcagtggtaggcgcagctttaggtgtgggggctaggggagggaaaggataggtgttactttggaaagacaaaaagagataaatagacac

SEQ ID NO: 344 - DNA, 31615 bp, Homo sapiens
  source 1..31615: mol_type = genomic DNA
tttccttggtgtctaatcactgcggggacgcctgcctgattattcacccgcattccagaagtgtttaatcactgcggggacacctgctttgatcctccaccttggtggcaagtacaacctcccctgggtggcaagtaccacccccctctcttcgagtctctaccccctcttttcttggaacttacctttttcctatgggcaaccttccaccctccattcctccttcttccgccttagcctgtgttcttaaaaacttaaaacctcttaaactctcacctgacctaaaacctaagagtcttattttcttctgcaactccgcttggccccaatacaagctcgacaatggttccaagtggccagaaaacggcactttcgatttctccatcccacaagacctagataaattttgtcgaaaaatgggcaaatggtctgaggtgccttacgtccaggcattttttatacttcgttccctccctagcctctgctcccaatgcagctcatcccaaatccttcttctttctctcctgtccgcttcttcagtctctaccccaacctcagagtcttctgaatcctccttttctgcagacccctctgacctctctccccctccccaggccactccttgacaggctgaatcaagtcccaattcctcctcagcctctgctcccccaccttataattcttctatcacctcccctcctcacactcagtctggcttacagtttcattccatgactagctctcctcccacctgcccaacagtttcctcttagagaggtggctggagctgagggcacagtaagggttcatgtacctttttctctatcagaccttttccaaatcagtcagcatctgggctctttctcatcagaccccactaaatatatacaagaattccaatatttgactcagtcctacaatttaacctggagtgatttaaatgtcatcctgacctctcccgtctccccagatgagcgggaaagagtttataccctagcccattctcacactgacacctgcttgcatcgtgagccagacctccaagaaggcatcagggcagttccccgagatgatccccaaagggaataccagacaggcttcccaggtatagctaggtgagattacatggtctcttgcctagttgaagggctaaaaaaggcagcatacaaagctgttagttatgacaagcttaaagaagccactcaaggtaaagatgaaaacccagcccagttcttggcccgcttggtggctacccttagacgctttacagccctagaccctcgagggccagaaggccatcttattctcaatatgtgttttatcacccagtcagctcctgacattagaaaaaagcttcaaaaattggaatctggccctcaaaccccacaacaggaattaatcaacctcgccttcaaggtgttcaacaataaagaggcagccaagcggcaacgcatttcagagctgcaactgcttgcgcctgctgtaagacaaaccccagccatgccttcagcacacaaaaacttcagaacaaccaaaccacagcctccagctactcctttaaatcctcctcatggaccttgattcaagtgccgcaaaactggccactagaccaagaaatgcccacagcccaggattcttcctaagccgtgtcccacctgtgcgggaccccactggaaatcggactgtccaactaatatcacagccacttctagggcccctggagctctggatcaaagctctctggctgactgcttctcagatctcggctttgcggctgaagactgatgctgcccgatcacctgggaaagccccctggaccatcatggacgccgagcttcgggtaacttttacagtggagggtaagtccgtcccctttttaattgatatggaggctacccactccacattaccttcttttcaagggcctgtttcccttgcccccatagctgttgtgggtattgacggccaagcttctgaacctcttaaaattcccccactctggtgccaacttagacaacatgcttttatgcacttttttagttatccccacctgcccagttcccttattaggctgagacattttaacaaattatctgcttccctggttattcctgggctacagccacacctcactgctgtccttttgcccaattcaaggcctctttcacatcctccctttgtgtctccccaccttaatccacaagtatgggatacctctacttgttctctggcaaccgaccatgcaccccttaccattccattaaaacctaatcacccttaccctgctcaatgccagtatcccatcccacaccaggatttaaagggatgaagcctattatcacttgcctgttacagcatggccttttaaagcctacaaattctccttacaactcccctatcctacccatccagaaaccgggcaagtcctacaggctagttcaagacctttgcctcataaatcaaattgtccttcccaaccatcctgttgtgtcaaacccctatactctcctctcctcagtacccccttccacaactcattattctgttatcgacctcaaagatgccttctttaccatccccttgcatccctcctcccaacctcttttcacctttacctgaactgaccctgacacccaccagtcccagcaactcacctggactgtcctaccccaaggtttcaggaacagcccacactactttggtcaggccctctctcatgactttctttctgcccgtctgcctcccaacttattcaatatgttgatgaacttcttctttgcagcccctcttaccaatcttcccagcagaacactatcctacttcttcaacacctctactcaaaagggtaccgagtatccccttcaaggctcaaatgtcttcccctagtgttacatatctcggcatagtcctccatcaacatacatgcgctcttcctgcagaccgtgttcagttaatctcccaggcccctatcccgaccaccaaacaacaactcctttccttcttaggcattgttggatacttgcaactctgggtaccaaactttgtcattctaaccaaactgctttacaagctcactaaaggtgatttaactgatcccatagaccctaagtcctttccccattcttcctttcattctctcaaaaaggccctagaaacagctcccacactggcactccttgactcatctcaacctttttccgtccacacagctgaaatacaaggctgtgctgttggagtgctcacacaggagccaggcccacaatctatagcctttctatccaaacaacttgacctcacagttctaggctggccctcatgtctacttgcagtggcagctgctgctttaatacgtctagaggccctcacaatcacaagctatgctccacttaccctctacagttctcacaaccttcaagcgttaatgtcctcctcacacctttcacacttactgtctgcccctcgactcctccagctctattcactctttattgaaaccccaacagtaactattgcccatgggcccgatttcaacccagcttctcacttagcacccagcacaagtcctgagccacatgactgtatctccctaatacacatagcatcttccccctttcctcatatttctatttttccaatcccaaacccagaccacacttagtttattgatggcagttcctctaaacccagccaaatctcgccagctaaagctggtgatgctgttgtgtcctgtacctctattatcaaggctgctgcacttcctctctccactacttcccaacaagcggaactgattgctttaaaccatgcactctctctcgccaaaggaatgcacattaacatttacactgactccaaatatgctttccacagcctccataaccatgctgccatttggactgaaagaggttttctcaccacacagggctcttccattatcaatgcctctctaataaaggcccttcttaaggctgctctcttgctggccaaggctgaggtcattcactgtaaaggacaccagaaaccaacggatcttattgctaaagaaaatgcctacgccaacaaaatagccaaggaaataaccaatgcctccacacctgctaatattccagcccccactccagaaggccagtatttttctttctcctctatgactcccacctactcttcttctaaaaacccactctaccagtcttttccaactcagggcaagaggttcttagaccatggaaaattcattcttccttagcttaatccaggagacaaagattattttacttattatctctcctgcgtaggctctgcaatcaaaactattgaacttctccgttcagaccgccactcacacctatgggaaaagggtaatataatagatcattggcttaacaacagggaatcccattcatatgacagacaatggggacaaaaagctttggtatgtaaaacattattcctttcctggcctaaaaactcatcgccacctacattaaagctaatatgcctgattactgtttttagagaacttattttattagggcaattccaaactcaaaaatatgctaactggcaccttgttagctacatagaaatgcaccttagacccgaaacttactagactaactcattataaaattttctttaaggtgtccatgcagtccctggtcatagttgaagcagtcctgagaaacatcgcccctacccccataatccccagaaaaaaccgatattttcttcatcttttcttataactttatattttataaataaaaagacaggaatgtcaggcctctgagctgaagctcagccattgtaacccctgtgacctgcacatatatgtccagatggcctgcaggagccaagaagtctggagcagctgaaaaaccacaaaagaagtgaaacagccagctcccgccttaactgattgaccaaccttatgacattccaccattatgacttgtcctggccctgccccaactgattaattgaccttgtgacattcttcttttggacaatgaatcttatgatctccccaccatgcaccccgtaaccccctcctctgctaacaatatataaccacctttaactgtaactttccactacctacccaagtcctataaagctgcctctctcctacctcccttcgctgactctcttttcagactcagcccacttgcacccaagtgaataaatagccttactgctcacacaaaacctgtttaggtggtcttctctacggacacacgtgacagttcagaaaggtgggacaacttgaaatggggtgggtgggggtgttccaggtcataggtagattttaaagtttctcattggcaatcggttgaaagggacaagttattatccaaagacctggaatcaatagaaagaaatgtctgggttatgatgataagggattgtggagaccaaggttttatcatgcagatgaagcctccaggtagcaggcttcacagaatagattgtaaatgtttcttatcagacttaaggtctgtgtggatgttaattccggttagctcttcctgaaatcaagaagggaggggggtacagtgaggcatatccaaccctcccttcccatcatggtctgaaccagtttttttcacgttaactttgcaatgccctggccaagaggaggtgtgcattcagatggttggagggccttagaattttatttttggtttacattagctagaaagagggagagagggggagagagagtgtgttatggatacacacatactgggtactttgacagacactggaagggctcactgagccttcttggcagctacctggagacctgcctggagcctggaaagctaaaaacaacctttcccagaaatctttggagccagtttttgcaagggacttggggactgtgaagaagatgcacctgggtaagtgttagtggcagaaatgaacaactcgaggcagaggccatgcacaggacggagctcttctggcaagcacagtactggacccatatggtccctccagggcgagtgagcttctgcatctagtctagtccccaggtcactcatgctaagctgtggtggtaggggtgatggcagcttgctcatgtggcactggggctgtatacgtgtctcctagggtcagtggcagcagtgttagctccgtcactgtggcaggagccgaagggatctgggatcagtgactttatgtgaccagttttgtagaacagttgtcagccttgttcctggatttaacctagaagctcttcctttagccctgccaaggattcttgaactatttaatacaccttagaaaatgcatttttccttaaactattaataggtagagttaggtctattgtttgcaccaaagaacactggcttatagaagagagtgatccgcctctacctcagggtactgattggctcagaagaaggaaatagggaaagaaaatagggtgggggcgatggagctttgtgtatgtcactatttatttctctgaaaaagacagggagatgtgtgaagcaaatgtggcaaacatatagttactctttgaggtgttttttgtgggtatctgaagcaatatttttgtgcttttctagatgtttaaaatattttattatttaaaaataatgtttaaggctgagcttggtggctcatgcctgtaatcccagtacttgggaaggctgaggtgggtggatcccttgagcccaagaccagcctgagcaacatggcaaaatcccatctctccaaaaaaaaaaaaaaaacaacaacaacaaaaattagtcaggcacagtggcacacacctgtagtcccagctactcacaaggcggaggcgagcggctcacttgaaccccggaggtcgaggctgcagtaaactgtgatcacaccactgcactccagccaggatgacaaagcaagacccagtttcaacataataataaataataaatagtattatttttaataatattattaaatattattaaataataaaataatatttataaataatattaataattacttttattattttattattaaataagaaaatatttattatttattatattttatttatattatttattttatatattatgtataataaataatatttattattattttaaaaatacatacaagtgatgaagtaggcaaagatttctctaaaaggacacaaaaagcaatgactataaaagactgacaaactgaactacattaaaatcgaaattcattaaaattgaacgtcatcgtgataaacttctgtcctgctaaaacatgattaaggtggaaacagcaagctacagctggggaggatcttcacaatccatatacctggaagaggatatgcagccgaagatgctagcaacgcctacaaatcaatcaggaaaagacaacccaatattgaacagcacttccaaagtggatatgcacatagccaaaaaatacagaaaacatgctcaggatggaagaagtaaaaaattataaggaaaatacattgtacgttttatatactaattcgttgttagcattcaacatattttattacagtttttgaataggaaggacattcctatgaaataaaattcaaaaggtaaaactgagctcacagtgaaaacaccctctttgccccctcaacaacacagttcccctccctgggtcattgttacaagttcttgtatgtcttttccagagagactctagcatgtagaagtaaacatacacatgcttatgtatattcatacatgtgtgtattctcccctttttaataaaaacacagacacaaacactcccaacactatacttttttttttttcacttaacgatgtatcctgaaaagtcagtccatatcagtacacagtttccttatatttaaaaacgaatgcataggccggccgcggtggctcacgcctgtaatcccagcacttcgggaggccgaggcgggtggatcacctgaggtcaggagttcgagaccagcctgaccaacatggagaaaccccgtctctactaaaaatacgaaattagctgggcatcgtggcacatgcctgtaatcccagctattcaggaggctaaggcaggataattgcctgaacccgggaggtggaggttgcagtgagccgagatcacgccattgcactccagcctgggcaacaagagtgaaactctgtctcaaaaaacaaacaaacaacaaaaatgaatgcctaatattccatcatgtggatgtaccatactttctttaagcaatacattgggcctgtttaaactttttattccatttcattaatctggctgtcaatacattgcacacatacatagtgtttcgactgtagtagctttaaatatatgttgatatgtgtcagggcttgttcctaccaacccccagccactactattctttatctgaatttttctagctattcttgtttatttttccatctgaactttagaatctggttatttttttttttttttttttttttgaggcggagtctcactgttgccaggcgggagtgcagtggcgcgatctcagctcactgcaacctctgcctcccaggttcaagcgattctcctgcctcagcctcctgagcagctgggactacagatgcgtgccatcacgctcagctaatttttgtatttttagtagagacggggtttcaccatgttggccaggatggtctctatctcttgacctcgtgatctgcccacttcggccttccgaagtgctgggattacaggcatgagccaccacgcctggccaagaatctggttcttaaaagttcctcttggaatttttcctgggattacgttaaactggtagcctattttagggagaaccgatatcttttagatatttagtcctcctgcccctgaacatgataagcttttccatttatttaggtcttctttttgttgtctttagtgatgcttaaaagttttggttttttttcacatagattttgtacattttctgctaagcattttccttgatgtttaatcttttttattgttagtaaacagctggagtccttccttccttctttccttcatttatttatttattgagtttccttctgttgtgcaatggcgtgatctcggctcactgcaacctctgccttctgggctcaagtgattctcatgtctcagcctcccaagtagctgggattacaggcgtgcagcatgcccggctaattttttgtatttttagtagagacagggtttctccatgttggccaggctggtctcgaacttatggactcaagtgacctgcctgccttggtggcctcccaaagtgctgggattacaggtgtaggccactgcgcccagccttcctttgtattttctaactggtggttgtttgcatagatggcggcttttgattcccatttattaatattaaacccacacaccttactgaattattttattagctgtagtaaattttgtcagttaattattttgtgtttctcacttatgcaatcaagtcacttgaaatgatgataattttacctattttccagttaataagcctctaatttctctctcttaactagtggtgttgactaaaccaccagaacaacgttaaatgatgatggtaatagtatatgtgattatcttattcttgaattcaacaggaatacatttcatgttttccatttaagcattatactatctttgaggttgaggtggatatatctgatcatgctaagaaaataggcatctatttctatttcactacaatctagttattatccagatggatattgaattttgttgaatccattccagtagctgaggaaatggattatgacttttctctttaaatctatgaccaccaagaacacatctgcagttgaatggggttgggtttatcggctccttgcaaggaggaggaaagtaaaccaaaaggaactatgggatgtctcacaagagggtgttaaaaaggactctttataggacagggcttgttttagtagatttgggggaggttgcaagaaaatggggatttcctctcaatgggatgatgtcgggaagtaggggcaattctataattgtgtatattttagataattcttatggagaagacgagaagaatagagtgaggctaaagctatgacggtgaaaagcattagtcatttgtatcagccaggatggggaggtttcctgcggtttggataatgttcttgttttgtctgtgctcagagatcattatggagtggtctgatctctgccaaaagacacgagggatttctgggagcaccacaagctaagacaaagacatggaacagagtctttcctagagctttcagagagagtacaacaccttgatttcagacttctaccctccagaaccgtgagacaatacatttctgttgttttaggctaccctgtttgtggtattttcttactgcagtcctggaaaactaataaagatgccaactttaaagtatacagagttgccagttgcggtggctcacgcctgtaatcccagcactttgggaggccaaggtgggcggatcacgagatcaggagttcaagaccagcctggccaatatggtgaaatcccatctgtactaaaaatacaaaaattagccaggcgtggtggtgcagagctgtagttccagttactcgggaggctgaggcagaagaatcgcttgaacccgaagagccgagatcgcaccactgcgctccagcctgggtgacagagtgagactccatctcaacaacaatggcaacaacaacaacaaaacaaagaacatacagagtttttcaagattcttctgggggcccgtgagcccaaaaatttgctttagatcagtgtttctcaaaagcttacataaaccatgtgattctcatgcatttcactcccttaggggtttattttaaaagtcattttctgggcttcttccagacccacataatgggtgtgggccctgtattctgcattttcaaacaagtttcccaggttcttctacatcccaaaacactgctgaagtaggaagatacctgggctgtagacaaaaatttggatttaatctttacccagtctattactgagcaagtcttgtcaatttaggcaatttaagagttaaagtgtacactctactgggaaaatccccggttccaagtcgagtgactctgaaatttattcactgcacagcatttgtaaaattgcttcttcttttttttttttttttgagacagagtctcactctgttacctaggcaggatggagtccaatggcgtgagcttggctcaccacaagctccgcctctcaggttcaagcgattctcctgccttggcctcccgaatagctgggattacaggcatgcaccaccatgcctagctaattttgtatttttagtagaaacggggtttctccatgtttctcaggctggtcttgaactcctgacctcaggtgatttgcctgcctcggcctcccaaagtgctgggattataggcatgagccacctcgcctggcccagaacaaacttcttaagggtctgtctagctctgacattccacaaggctatgaaatggtccaggaagagttagggcaggatggcaaattcaggtgcctttgactttgggaagatggaggcaaagcactttgtccatccaattactttgtatttatttatttattgtttgtttgcccagactccagtcttgacaattactctgcattttaaaacactgttggggctaaccctaccaacctctcccctgacccgagacagagttagcagctaatgtagctacttcccactttctgtcacccctgcaaacagggcaaacagggatgctgtatctggaagctctaggggcaggagccagtcctatttatcctttgtaaaacacctagcaaaacgagatgattttaggtcaaccctcctgaaacttggcttggctgcagtgacaagttttgtacctacaggaagatcagcatttccttccgttcttcctctgccaatccatccctgactggtcttttgccctcttttgagtaagaaactccttgttttagagtgtttctggattaacgctggaaagggaccaactctgagcccatagtgtggatcccatgtaacagtactcttaccagaaaaggggtttcaccccagaccccaagggcaggttcttggatcttgcacaggaaagaatttagggtgagtcgcaaagtacagtaaagtttaaatggtttattagaaactaatctattagagtagggtatcctcaggaagcaagaggaagaacgccctacctcaaatgtaatgcttgtttgtgtaggatattagagctaagaatagtgtattttattacaaaggcttgtgatcggcttgtgacagactatctgtattgttattctcttgtgcaattaatttcagaaagaatttatgagtggactattatctttagagcaaaatatagtttaaattaagaatgcctttttccaggccaggcgccatggctcaagcctgtaatcccagcacttcgggaggctgaggtgggtggatcacttgaagtcaggagtttgagaccaggctggccaatatggcaaaaccccgtctctactaaaaatataaaaattagccaggtaaagtggcgcacatctgtaattccagctacttcgaaggctgaagcaggagaatcacttgaacccgggaggcagaggttgcagtgagccgagatggtggcattgcactccagcctgggcaacagagtgagactccatctccaaaacaaaaacaaaaacaagaatgcctttttccattaacttgtttcctcaacaataaacatcttgtgatcaagagtgctgacttcctgggaatgcaacccagcaggtcttgccttccccagcctttatttaggatagtgtcactctagttaggacacctctgacaatacaactcaaatcattggtagctcatgaaaagaactcactctttgactaaacttgagtcaggctcctctcagtcctcgttttgactaggccctgaccctgggctggtccttaactcacttagttcagttttagcaagaatcctgctgagtcagttcagcaaaaatcccctacccttggtatctgatcacctcggcttgtgttcagcaaaaatctccctaacctttatgtgtcctcttagtaattttccatctgctgacttccaccctgttgcttaactataaatctccacctgtccttgtatttgatgttaagcctgatttttttgcccctattgcataatccctattgcagctgttcttgaataaagtctctcaccttaacaattgtttgaataatttttcttttagtgccatttcctactgtaacatgctgtgtgagtctcaattttctgatccatataatggagaaactaatacttccatctccgaggcatggagatcaactgaaattaaaaataacttgcatatggctgggcagggtggcacacacctgcaatcccagcactttgggaggccaaggcgggcagatcacttgaagtcaggagtttgagaccaccctggccaatatggcgaaaccccgtctctactaaaaatacaaaaattagccaggtgtggtggttcacgcctgtagtcttagctacttgggagactgaggcaggagaatcgcttgaactcaggaggtggaggttgcagtgagctgagatcacaccactgcactccagcctgggcaagagagtgagactccatctcaaaaaaataaaaataaaaataaaaaacttggataaagtgtaaagataaaaatcactattcttgggcaggggtcccagctgtagcccaagctggagaactagactggcttggcattaatttgcttggggcaggagaagggtcatctgaaagatatgggaaaagctgaggttgcccctgggaagactagggaagcctgcccccgggccagccccttgaatatgtccaactgaggaggtggaaagaagttcaaggtagccagggagacaaaagttgttcactttggtgcacatgtggaaccaacatgggacaaacaggcattttgtgctcgtccagggaacatgacttcttcggctcccacacaatttgtagctgcaggagtggcagagcaccagagtggatgcaggcccagatgttctctgggttaggtgttaaggacttgtgggagtcatcaggcagcaggcatttgccccagtgtcagaggtgtttaagccagaattactccatcttgaataagggctgggtaaaatgaggctgcattcataggaggttaggcattctaagtcacaggatgagacagaaggttggcacaagatacaggtcatacagaccttgctgataaaacaggttgcagtaaagaagctggctaaacgccaccaaaaccaatatggcaatgggagggacctctggtggtcctcactgctcattatgcactaattataatgcattagcatgctaaaagacactcccaccagcaagcaccatgacagtttacagacgccatgacaccatcatgaaatactctatatggtctaaaaaggggaggaagcctcagttccgggaactgcccacccctttctctgaaactcatgaataattcaacccttgtttagcatataatcaagaaataaccaaaaaatgggtaaccagtagccctggagctgctctgcctatggagtagccatccttttacttctttgctttcttaataaacttgttttcactttactctatgggcttgccctgaattctttcttgcatgagatccaagaaccctctcttagggcctggatcgggacccctttctgataacaccaggagacaccctgggtggatttcctgaaccgaccgatagatgagccttccacgcgggagacctggatccttatcgtctttgtggccccttccatctgcacgtgcggacgaggtccgggtcgcactcgggcggtcagcctggcacgcacagcgccggcgtgcagggggccttgggtgccaccgagtccgggaggaaatctaggccgccatccgtccggagactggcacctgtgaccaccacccaacatgtattgaacaagggcttggaggtcctttctctaaggccgcaccgataaacgattaccgactgttgacctcacggccccttcgcttccggccgcaccgcctcgctgcccacgcctgcgcactcaggcaccgcaggtaggaggaacgtaccaactgcgaggcggggggtgcgcgcgaagacccccgcaggctgcgcttccggaagtaacccctggcgcatcccggaatccagagcgcccactacggcctttggccaggccccctgggcgcgttccgggagctcaggcctgcggcgctgggagaagcacgctggccaacaagttgggtggtgggcacgcggcccaggggtcaggggccgccaggcggcgggcggcggggctgcggctcttacctgccgaggaggcgccggctctgcggtgcggagttgcgccggacttcccagcttggccagtggctccgcaggctgccggctccacccctcaggtaagcggggactgggccgccgaggttcagggaagggggcggctgtcggggcccgtgccggccccggggggccacctgctgggccagcggtgccctcgcgccgaaacacactgggagaggccagaatcttccggaacagccagcccttacccatctctccctctgtgccgagaactgccctgaaatactgtggtattaattaactcgtttaacactaacaatctcatgaggcgggtgctgttactattcccgtaatgtagacgaggaaaccgaggcgtgtgctggagcaggatcacggccgtgctcagagacgggctctggatgccatgctctgactccattgttagccctaagcttccagaaagtagcagagtgctgccgtgtcgtttgtaacagatctcactttgtgtcattttttttgcacagtatgaaacctaatgatgcatgattattatttaaaacatcttgcttagactttataagtagtcaaatttgcgtgtgggacaaaaccccaaaacatgcaatggcttgctctcctcttttcctttcacacgttcatctcctcctatccctttctctcaccacctttcaatcttctcacagatgttgtggaggaagatgagacttgagggcccagcaggtgcttaaaatcccctgcctggtgggggtggagtagacactctgtccccctgcagtgctggagttgagagcagaggggctggagagggactgggcggagtgagaaaggcctggcataatcatggaatgcccagggtggggttctacttctcttgcaggcacaagagaagtagaagagtggccgctttccttctgggcacgcacttgggaaaaggcttggtgagagcagcgagaagaataggtctaatttcttgagccagtgtgcggaggtgcttcccagcccaggctaagccagatcactcagccagccgctggctgcctttacagatgtacggctccccgtgagcaatcaacatgcctggctctcaggcataagctgcctcacttcccttctgcacagcactccaggacttgcctgctaccagacccatcctactttctctgtcaggaaaaatgagagttcttcctggtctcttgaggccaatcccttccaccgcctgtgccctggatccctttctccaggaagcttctcttccctgtgtagttagcctccccgctcttcccaggtcaccttctctctgtttagggacagagccaagccttttccctcccatccccacctccagcattcccggttcctgcttctcccccacttcctgctgtaccgcccactgaagggacctttgaccccgctgaccactgcttttggaaagtcttttcttggtttccctaacttcactttactttggtttttccttgtctctcccctctgcctctcagtcacctttgagatctgctcatcctctcacctccctgtattgtcagcattacctgggcagccccctctggtgttttccttcagtttctctagaaacttgcctgaagatttgccccaaaatagcccacatggacctgtatgaggaaagaggctcactgtggaggcgctctccatcattcctcctcttccacttgaggcttaggcatgggccacctcctgaacagctctccccacagtctcctccatgcattgtgccatcaccccgccctgccgtcaccccggcctggcccgctttcccttttgcctcccagggatgtgcctgcttcccatgtggcctggctagggcgctttcctgactgctgcccacatgatcgactatgggcaggcgtgcagcccaaaaggccgtgcttcagcttagaagcccttggaatcttgtcttgttgtggttgtaggcctccaatgtgttgtcagctgtggtgatgtgtgtcacaagtaacttcttttttttgagacagggtctggctctgttgctcaggctggaatgcagtggtgcaatcacggctcactgcaatctccacttccctgctcaagccatcttcctgcctcagactgccaagaagctgggaccacaggcacaggccatcacagctggctgatttttttgtattttttttgtaaagacaaggtttcgccatcttgcccaagctggtctcaaccccctgagttcaaagcagtccacccaccttggcttcccaaagtgctaggattacaggcgtgagccaccacacctggccacaagtaacttcttagttataaagtactgaaatttatcaatgactttctttttaaaatttacgttttagattcatttggattcaaggttggctctcaacagtgccagctgcactgtcatcctaaagtacttctgtggaagagaacatggtggtgtcactgttgtaccagtgatgacacaaaatcccagatctacctgacgggcctgcgagggttgaagattgtgaagcaatagcctaaggtaaacaacaccttgcaagacgggtctaagctcttcagtgtaatagaccctgtttctcagtaggtcagcccgggggccccccagggatccctccccgcctcatagcaccataccccactttccccctggtctaatgatgagcccatttctaggttgtcgtctcatcctgagccccaagtgccagccaggcagctactctcctctgttcatatcttgaaggcagagtgctggctcatagtagacatttgatgaatttctgttaaatgattgagtgaatcaagagtatctgcagagtatagcatttatgatgagacaaagctaattgggaaacagaacaagattggtgtcctggggtaactgggtaggtcttaagatgaagattttggggtgtgctgggtgcagtggctcacacctgtaatcccaatactttgggaggctgaggcagggggattgcttgatcccaggagttcaagaccagcttgggcaacatggtgaaatcccgtctctacagaaaacacaaaaattagctgggtgtggtggtgcacatctgaagtcccagctacttgggaggctgagtttgggaggattacttgagcccaggaggcagaggttgcaacaaggtagatcatgccactgtactccagcctgggtgacagagcaagacccagtctgaaaaaaaaaaaaaaaaaatactttggagggtgaccccgttctgcagatggcctctggaggcctggatgttcacactctggggttgcagtttcctcaatcatgaagtgagagttaagtcccctccagtgtgacatccaagagcagttgtgggcccaggacagcagcctgtgtttcctttgcagctttacctagcccctacacaagcgccaccttgcagtaggccttcagttcttggatttattggtggctgaaagttcttgcgagatggacttgaagttgttgccacttaacccttctgaggttcttctggctgggaggagctcctctttctggccagagtcttgcttgagccttcttagccatctcgtcacctgttataggcagccctgccatctctggtgaccctttttaaacattaccctggtgagtaatgtttagcatcactcattgtcagatcttttttatctttttttttttttgagtttcagtaccagtaagtctttatgtattcattatatctttccagggaaaggagaagggaagtgaaaagggtcagcatgtgtgttgcaaagtgattagaaaatgggaaaggaagtacctggtacagaaaaatcagccatccaatagatgcaccccagagatggagtaaccaaagcccaaggggccctggtctcctgcagttcaggactgaggggcagggatcagggaaggtacaagcctttctaccctccctccctgcccctaaattcaagatttcacataaagctttggtttctagcagtaaacatggggttacattcatctgtctccttttaaacaatcttgtagccactttgacataagttcttgcaccgggccgggcgtggtgactcacacctgtaatcccagcactttaggaggtcaaggaaggaagattgcttgagcccaggagttggagtccagcctgggcaacatagtgagaccttgtctctacaaaaaaattaaaagaattagtcaggtgtgttggtgtacacctgtagttccagctacttgggagctgaggtgggaggatcgcttaagcctgggaggttgaggctgcagtgagccaagattgtaccactccactacagtctgggcgacagagcaagaccttgtctcaaaaaaaaaaaaaaaaagtttcttgcacttgcgtaaaagttcctaagtgacttagatatatactcatattcctttgcctggtctcctgaccccacttctacgtggaaggcccccggttgcttctcccttctttgagattacagattaagtaggtttgatccatcccaataaagcagtgtcttaagtgtttggggtgaaccacattgactcaggtttggaacaagagatggagggttcctgacttcttcaggctgttctcatacatcatttaagagttgcagagacagcctgagaattcaatatatgcgtgtgtgggtatgtaggttttcttttggggtaggtgaatggagaagaaggtacggtagaagtcaagtttttagggcagaagatctggtccaaaataggaaatagaggaaggggaacacaaagaaaggatagttcaaaatccctacttcaatatgggggtcccccaaactcatgttttacatcctttttgcctggttcagaactttctgtaaagatgctttggccatttttctctcaatacaaaaaagtttgtaaacaataaaaccccaaaaaaacatggagaaagaccaacacagtatagttacacaaactaggccacctagcagtcaccaactgctacaaagtccagacagatacaggaactagagggggcagcgtcagggggaaacaaacccaggatcagatgtgcacccctgaacacgttctatcgtgcttgtcccattctagcccagcaagggaggtttgtggtgatcctatagcgtgtaaatgaagcccccttttctccttagttaccgtgatgctgaatcagcgctgcagcagggcaggacgctggctgtgcacaccacatgaagaggccctctcttacggggctcccttgaacccaagaatttggaaacgttaagaattttagttcttgcttcatatatccttccctggacagcacaggatgggtacaggggcactggtcttaaaatttagcgttcccaagtcacgtcttttacgaatacacacgcataccctctgttgtggatggtaggcctagcacagtccagtgaaggacggacctggtgtgtgaagcaagtcccatgccctaggattaggaaaccctcacctaaccgtggtgtcccttggtgtctctgcaccttagtctaattttcaatcttccactagccagagatcaagtcttgatgctatccagttgaaacctagtctcccgtgaaacattttcaaggtcggggggtttcaggaggacactgtggcagaaaagccaagtctctggcaaacatgaggtagttcaataggctgggtcctccatatagttgctcttcgtggttagaaaaacaaccagaagtattcctgctatgcaggcctggagcttctgccgacttatccctgaggttgctcagtacctgagaagagtaaagagtgagggaccgagattaaagtagacaacagcacaaacaacattaaggggaataaaagctaagatgcacggacgtatcggtgacacagctagtgctgtgggcacccgggagacgggggaccgaggtacggtatccaagggagcgaatcagtcccatcgcactggcctggagctgggtggggtgagtgtgggagccgcaggtctgcagcggtcccccagccacactctctgcctgtctccgccacccattgcttgggacacttcccagcaccctgtcccaagagtgggctgtgaggaaacaagatgtgagtaaagcctggcctgcccatgaggaatttcctccctcagaaggtagtggctgtgggttgggtccgtcatctggcctcatgcttaatcatttcactccagcatgggaaatattatgattacctgtccttcttaaaaaggaaaacaacttccctgtccaggccacttttgaaagctggagattctaggggtagtgcctcagacaaagcatgtaggctcctgagtgatttcccccagctgccctcgtttgcatttggatagagcttggttggagttccaagggctgatgctgggaaccttgctctggatgcgaggcctgcccctggagggagccgcggaggactggcagctgcagatgctggagcaggccagcctgtggctgggccgtagcttcctgctggcaggcttcctggtatcgagcagctgccccagcctggagcaggcggccaagggtgagggctgttcccccatcccttgtttcgcccactgcctcgactccctggtgagaaactttctgtgtcaccctcacagtgtccagatcatcctgggcactgccagggccacctgcagccatttctaaggctctgtggaggcccagggactcctcacccagctccagcgccagcgcagcctcctagcccaccagccctttgaggagctcttggaccactgggtctcggcctaccacctgctggagtggctggtggagcagcagcagccccttcaagagtacaagggcaggcaccagctggggaaggctggtgttgccttgtcggccacattctggagcccggcagacagcctcagcaagctcctgtagcccttccagatggtggtccgcgaggcgagtgcggcacaggcctctctgagccaggtgctgccccagctgcgctacctgcacatcttcctggagcaggttcacacacactttcaggagcagagtgtcggggagaggggcgcagccatccagctggctgaggggttggcccggcagctctgcaccgactgtcagctcaacaagctcttctaccgcgaggagtttgtgctggccaccttgctggacccttgcttcaaggggaagattgaggccatcctgccatgggggccgaccgacattgaccactggaagcaagtcctcgtgtacaaggtgaaggagattagagtgtctgaatactctttgaactccccaagtcccctgcaaagccccaggggtctgtgcgtggaccccaccagggtagccaagagctccggggtggaggggagaagccagggggagcctctgcagagcagcagccactctggggccttcctgctggcccagagggagaagggcttgctggagagcatggggctgctggcctctgagagaagcgggggctcgctgtccaccaagagccactgggccagcatcattgtcaagaagtatctgtgggagaatgagaccgttggagcccaggatgaccccctggcttactgggagaagaagcgagaagcctggccaccatctatctgtcttaccccccacaggagccttctctgaaagcatctttgcctccctgaacagccccacccttgtagagcaaaactcttctctcaaggtggaagccattgagcatctcctcttcttgaaggccaacctggagcagttccccaactacaccccgcctcccctcatctgctctagtggtgacctggccaaggggatacagaccctgcagtccgctcagggtgggatggcagacatggcaggtgccggtgctcaccctgcccgtgaactcctagagagcccctgcctgtaataggtcaaagcagagagctgggtgttgcatcctgggcgccacatgctcatggccagaatcttaaacctatttggtaggaaagggtcagtttctcacttgacagattgccatatttttttttctgggagatgtcattttccatctcccgattacttcctttacgtctagcagtatgtgccgagaagaggcttactctcttcgtaggtgactgtgaattttgtactacgtggctttgtacatgtgatgctctgttaaaacataagtgggtatgaaggtccttgcatacaccttgtctgtgtggataagtggacacatgcccttaagaggcttgctttctcaaaaagtggccaaggatgtggagtgggcatgtgctggcaggtgggatatgtcctcagcctttgggggcctggataagctattgcagcactttctgaggctttcactgtagggagaaggaaaccccaagggtagaatagccatttccagagggaagtacacacatacccccacacaccagtctttttgggggtttcagagtggccggagaaaccgactgaagggactgaccagctagctaggagagctgagacgccagtcctcaaatggcgttcttaccaatagtctatttccagactactggaaacgttggggtttcttcctccagtgacagcagcctcagtagctttcctgggctccaggcggctggctgcacaccctgcctgccatcacccttgcccctgcttgtcctggaccacttttaaaggggaagtcccttatttggaagagagaaaggatgtgtgtagcacacactcatcatggattgctcagagttcctttagggcagagctgagggcctgggatccaggaaccagtgggattggatgggagaagaaggaagggggtggcccgtcacccccgcaagacttgcatccaggtagcctaaggactcctggtcactgggtagggtggctgctgagatgcaggtcggaagaggcaggggaaggctccaggcctaacttggagcatgtcactggccatgggggtgaggggacagactctgctctcactggctggcagccccaggagcctgttcccttgcctctcctggatgggttgtcagccctgtgtttcactgtgaccaattcattataacatttggatattactgaaaatgtaaggaagcaggaaaaattaactactttcattcagagatagcctctatcaatagtttgacatttttccctcttttacattgagatcataccctaggtactgtttagtatgcaatattttcattttcgcagtataataattgcacctgttaaataaagttttgtaaacatttaataactggagtagtatgatttgcattaaagtctggcctccagattgcttagatcactccactacctgtagcactaggtgtgggagtggggtggtggggacacattcgcaggtgatagggggccggatttgtctgggggaggggcctcactactgcccctggctccagagcagggataggaggggcagggcttgctggatctctccctgcagtgtcctgtacctcactcgcaggatcctgactcacatgtcggggcggggaggatccgagaatgtgatgcatcctcaggttgccttgggcagcgtgcgtgactgtgcttccatccttgagcagttggaactgttcttggaagtggcattgtggctctgctgtgtggcatcaccgagcgggctcatgttctgggagaggactgggaggcctagaatggtgaggcagcgaggctcgggagaagaacgtgagaagattgggtgaggatgaaaggaagagggtgagagagcttgatggcaccgaaccagggggcttgggctctagaaccttcactttcatctaggcgcagttttgtcccccagtggacattgacaatgtctggaggtgtctttagttgttccaagtggggtaaggggagtggttctgttggtgtctagtggacaaaggccagggatgctgctcagcaccctccaatgtgcaggacggcctccacaaccaaggctcagcctgcccagatggcagtaatgccagggttgggaagccctcttctagagcgttagagcctccagtccacccgaggctgctctgggttgaagcgttcctccccctagacttagctctgccctgtgggcctcatttcccaggcagaagacactcaccaacgcctgggaccatcttccctggttctcagtcagcctccctcaaagggcccaagtgccatccttgtcaccagtcctctttccagactctgttgctgggccaggaggtctctgttcccttcatttccatagttaggacaaggacggctccttctggaggagtgctgaagcaggtggacgtgcgggaagccatcctccttgtgtctgcgggcagcctgatggttagttgggtctgcacaggtgggcgccggctggttctcagtcctactgggctacctgtttgcagtgtgcaggtgatggaccagaaacacagcagaggtcactgacccccaagagaatgagggttatgcacgacccatcaccaagacccaggcctgcatctggtgagggcaggacggggccacactggtgcagggctgtgtgttggagggcaacagggaagggccgatttctgtcccggtggggtctttctgctccgtttcctcttctgtaaaccatgttcctggtgtgagcatgcacagttgcctgcctctgtctgcctgcttctttgctctctccctttgctgagccatcatctccatctaaaaagccactgacccagttcctcagggcattcacttaacctctgcagtcccactgtggcctcacctgtgcccaggactgctcatccagtggctgtgtctccagcctcatctcgtctgagtccagtggggcgtcctagtagtgttggtctcactccttaaaagccttccgtgttctcctccctctggctgcttggcagaatccttcacagactcgttcattcagcctcgtaggtcagcctccacctctgctgctcgtgcataggacatcttccacattcactcctgaaatagcgggtgggtgggaggggtgcctgctcctggagagaggcctgcgagttcttagagagctctgtatccccagcatggttggccccatgcactgcatgccctccttgatgccagctgccatctccctgctgatggtgcctggatccctccagcctggagctccagctgcctcctgagccccacgccacactcactcaagctgagtgctgtgtagctggatgtcttcttgtctccaacctgtcccacctgcatttcacatgtctgagaagggagccccgggccgggtgtggtggctcacgcctgtaatcccaacactttgggaggccgaggcagggggcatcacctgaggtcaggagtttgagaccagcctggccaacatgatgaaaccccgtctctactaaaaatacaaaaattagccaggcatggtggtggcgggtgcctgtaatcccagctacttgggaggctgaggcaggagaatcgcttgaacccaggaggcggaggttgcggtgagccgagatcgcgccattgtgccattgcactccagccagggcaacaagagtgaaactctgtctcaaaaaaaaaaaaaaaaaagaaaaaaaggagcccctggcatacagtcacccagcaagattccccagtcgtcctaggctctttttcctcctccccattgcttcctgccctccttagggcctgtatcttttgttttcacagcagacaggtttctagtgcctggtgctcctcctgcaccccccacgttaggggccagagcagctttaatcaaatgcaaagttgattgcatcactccctgtttacaaaccccaaaagattccattcccactgagggaatccacacttcttggcagatgcttccagtctcttttggaaagtatatataaatatttgaggtataaataaaagagaatgagctggaatgttgcagactagaagggagctagataaggaaatgggggccataagcacaaggactcccctttccagatggggtgtagaggacataaggatggcaagaccgtttacatcctcgccagctccctggttgggaacatagtaaatatctttgttgatggtgtgggaggagctaagtggatcaggctctgggcctggtttccttggagaggggaaaatgaaaagtgttgatatgtaaactcagtcaccgacaccctgcatcagatctgcagggcaggcatcaccccgccggcctgggtgagactcctgggtctgggcctggccaaagtctgccaggttgggaaagctgcgcttggaagaggtctgttattttcctcactgcttaaatcttgaggtccctccaccaggccacccctgctttgtgccacagtcatgcgctggcacctggactcacctggtcctgcagcccctggcaatttgatgtgcccctcccggctttctggagccacccttccctccctccaagacagcctgccctttgggaaatttatgttgtctttgcagctggcaccgtgctgtctggcacgtatatcagtgctgttccattgatctgtccagctgagtccagagcaaaagagctagctttggcgggcagtgaagtgagagcaagggtgtgcgacctagccaggccacttaccccagccttccctgtcccttcactaccttgacctcagttttctccttcaggactaaaggccaacttcttatgctctacagctccaaccagaggtaccagctgacccatataatctggaaacaagtttgaattcattgctgttagaaagaattgcagtaatactgagtgaatcaaacaaggcacatgtgctctcgtttgcattgcatatacattgattatcccagaaagaaaacaaaagaaactggtgatggtggttacctattgcctattcaaaaataacggtttaaaaaacaccccaaaactaatagggatggatcgtgagtggttacggaaaaagtaaaataatgttttgcccctagtttggatttgacaggaagaactggtaatattgggcctgaatccatccagcatggccctaaccagccagggccagtctgggctgctccccttgggttgggcctgcaccccatccctgtcactcagatggcttttgtggcctgtgtcccagcttggtcttcaggtcttgcctggctgagattgttggttttcatggtaaaagcagggtcagactccctgccgtcacctgctgcgtaagacacagaaagtgctgcctgctgactgactgtctctcctcagggactggctggcttcgagcagggcatcggaaccaggcctcctggcactggcctgggtagagccagggcgagcaccagctgacccccagtggaaccctgtgacagtcctgccagggcccaggccatcccaaccgacttccatctcatggaccctccagcggagaagccgggagaggctggcggactgcagatcacaccccagctgctgaagtcacgcacaggcgagttctccctggagtccatcctgctactgaagctgcgtggcttgggactggctgacctgggctgcctgggagagtgcctgggcctggagtggctggacctatcaggcaacgcgctcacccacctgggcccgctggcctccttgcgccagctagctgtgctcaatgtctccaacaatcggctgacgggcctggagccactggccacctgtgagaacttgcagagtctcaatgccgcaggcaacctactggccaccccgggccagctgcagtgtctggctgggctaccgtgcctggagtacctgcggctccgagaccctttggcccggctcagcaacccgctctgtgccaacccctcctactgggctgcagtccgggagctgctgcctggcctgaaagtcatcgacggtgagcgtgtgattgggcgtggtagtgagttctaccagctgtgccgagacctggacagctccttgcgtcccagctccagtccaggccccagagccaccgaggcccagccctgggtggagccaggctactgggagtcctggcccagccggagcagctccatcctggaggaggcctgccggcagttccaggacacactgcaggagtgctgggacctggaccgccaggccagcgacagcctggcccaggcggagcaggtactcagctctgcgggccccacctcttccttcgtcttctgaacgtggcctatggcccaggacagcctggcaggtggcctcgctgcccccagttcccctctctgcccccacactcgtcttagttgcttcacactggtcactggccctgcacactgggctattgctttatccctatcctgagagcagcccctccccaccatccctccacatgctgcaaggacagactgaagggctgtgagcaggtgtaagggctcccacatccgtgagcctgtgtccgcagctgctgccactctgggctgctccagcctgcaacttagtggaaggaattacttcctcctgaggctacaggcgagaaaggtagggatgggccagcctcccgtctcagctgttgggagacagtaggcaggctgagtggcccagagcactcctggaagtgggactcccctgccttgcaaatgtgcctctccagactgctcctgcacttaccccctccccgcagcaccttctctgcccgttcttgtccacacatctattaaatgcttctgttttcatttgcatccctgcctggcatttcatgggggcacctctggctctggagcacaggaggctctgctcaccctgcccacaggaaggggtcccagaggaagggtcctgtccccctgccctctctggccgcctctgagctacgctaaggaggaagtcgtgcaacacaaggagctgagaggcagctgggagagcagctttattatcatggctggggatagaacgggttcctctccctgggggctggggtcttccactggttaccacccgcagcggtcctggaggcaccacgcatctctagacaaaaggggaaacaggtttgggggtgagggaggttgcttcagccccagtcccagctttcctcccaggcttctgacctgtcccctcccaggctcccaaagcccagcccagcccctcagcattcccagggctggcctcatccagacggtgctctcagccccctggtgcctaccagtgctggcttagctgcggggcagggccttggagaaggcgaactgtccagggaagtagaagctgtgggggtcctcaccagcccgctgcaccctgaggcactgggtctcctggtgctcctcagcctcctgccagtgcccaaaactgttcaggcagtgtaggaggggtgggcagtgccagtggagggctgccagcatcctccacatcccctccacatcccttggagaatgtccaaacaggcacagcgctttctagcccccactgccctccctcctgcttggccaagctttagcctcgagaccagcccataggctcagcttccatccatcttcccagccctgtcaccacctgtgcacccttgccccttcttacccgcagaacttgggtctctatggggcagtggaccaaccggcccagaactttgtcctcagagcccagtttgatgcaggccaggcatttccgtttcctctgtgggggagcggggagcatggggtgagcagaggaaaagggtgagggaggcctgggcatcatgagggtgggagccagggctgcccatcatgggaccagatccccaactaggccctcgagcccaggagcaagaggtcatgcaggccagcaggtttcaggcacagccaccctagaatgtcagaagtcagacccatgcagttttcaaactatggaactttcatgtgtgtgcaggcaggagtccttcccagatgggttgtgtggcacatgcataaacacgcatgtatgtggtttgtatgcaggagtgtgggtggatgggtgtgtgatgtatgcatggatgtgtctgcttgtgctcgtgtgaaggcaagaatcctcctccgatgggttcttcccacccaacgcctccagagtggctcagctgtcacctattctatttattttcttgtaagatttgattttgaggttgatgaatcattgctatagtccagtgccctccttgagccgacagagggaactggggcctttgcagaacctgtaatacagagcccaggccgtgctcacagagcgggaactagaac

SEQ ID NO: 345 - DNA, 157066 bp, Homo sapiens
  source 1..157066: mol_type = genomic DNA
aagaccaaggcagtgcaagtggccacggctcaaggtttcccccaaggaggactatgtcacttaaggagtatggcctctgaagtaatgtaaatatggcctggaagattcagtcaacacctatttccttagtgcctacaatgtgcaggtgcagtttctgctcccggagttcagtcatgaacaatgccacagtcagccctgccaacccacctgcgtcagctcaggcacccagagcaatgtcacctggatctgccctccctcccatgtcactggactcgctgtcttttccctgcaatgaaacctccaacagctttccctgccactgtgggtggaagggccctcttcctcttcccaccttcatacagcttccaggccacctccttaagaatccaaagcaatctggtcacaccacttggtgggaaatacaccgaaatgttaactgtccttatcactgggggaaaaaaatcacaggtgacttcagtacagcctcctctcctctaccatcactaccctccctcccatccttccccaggtccagccacactgaagttctccccataccccaaacacaccagtaactttcccacccggtgctcctgccgtgccctaggcaggggcttttaacccctacctaatcctccgatttgctttacttttaaatccacctctggagcatagactgtgagcttcagagagcacaggtaagttcattactttttcaacaactaggagagagctgcgacgcacctgccccgatcctagaggctggggacccaccagagaagtgacaagtccttgatctcagggggcagacagcggggagaaggatggatgctagcacggagaacacgcgtgtaaagacagaaacgcacacatccacaccatgccgctgtgaagccggcgcccaggaggctggccaaggtcacaggagcggcggtggcgggcggatccgagcacctctcggcctgaccccagagcctagctctcaccccggcgagggacttccaccccgactcaccgcggaatggggagcgccaggctgaaccaaatcctgtgctcacccctccgtgcaaacccctcaaggcaactcaggcctctgaaagccttcctacccccccgctctccgctcaggtccccactcaaccggtgcccaccgccctggcgcgcgtcgctccgcgattaccggcccgccaaacagtccccgcaaagtccaccctccggggctcccggtccctcaggtcccgcgtgcccggccctgggcatccgcagcgtccccgtggtatcggacccccatcgtccctgacacctggcgtctccgccccccgcccccgtcccccgccccgccgtccctggcccctgcagtccctggcccgcgctgcggacctccggctctggcttcccccgggtccccgcggcccccgtccccccgcgtccccgcgtccccggcccagcgcccgctgacgccatgacgccgcggcggagggaggggccggggccggggccgggccggggcggcgcgagcggctggagcaacgggccccgcggcagctgcgggcgacgcggtcgatggacatgggcacccagggatcggggcgcaagcggctccccaaccgggagcggctcacggcggaggacgacgcgctcaaccagatcgcgcgggaggtgagcgctccgggagggcagccggggggcgccgggcgggcgcgggggccggacggctgtcagggtctctccggcgtccgtctgtcccgctgtgcgtctgtgccactgcgcgtccggctccaggcgggtgggccgggcaggcgcgcgccggggcgctgatccccaggcgctgcgccccggccccgatctccgaggcctgcggaccccgcacccgttctccagccccgggcccagcccgcgacgctgcgcgccctcccccaccccggccaccgtcggccgctgcgccctcgggagaggagccgggcgccgccagcgcgcgaggtggcccgggctggccgggtgggggcgagcgccccgctttgttgtgcggcatgggaggaggcgggggcttaggcccgacctggaggcagtggacggtcgccggaggccacatggccctgctgaaatggccgagtcgctcaggtgaccatttgtcatccatccatcgatgtcactcaaggtgcagctcagagatgaacttggggatcactgtgatttttctttcaggactgagcctggaaacgggtccaggcacactgaaacgtcttcattaaagtttcctggacagagtttattgtaactaagatcatgtttggtgatgaactttacctgtgacaaattgaaggcgcactagaatgggtatttgtacaaatgcctttttttttttccttccgcaaggattctaccttaaggctaaagaatgtacatgacatccagaaagccgtacagggacagagagcagcagcttgggaaaaggggagccaataggttgcggccccagggggacaaaggaagcttaatttttgactgtgttccctttgtaccatttgaactgtgtgccaggtgggtgtatgaatgcaaagaaagtctctgccttgtaacccgccttacaggttcttttccgtgttggcttttccacatgtgattcttcccacaggaaacacctccaagccatttggactgtggtgtctggctgtatccgtcagatattctgggggatctactctgtaaccaatccttaggtgtttgtagttgtaaatacctgattttgctcttacggacatgtggcagtcactcagtatttgttgactactgagtgaataaagacttctgtttttctctgtatgatacagaaaagggctttccaggcaaacccttattcattcctggaagcccactgtgacctccaggagaccttccagactcagccctctcacatcgcaccaggcctaagtctccctggctccacggccctccatggcatgcccgcgcctggcatggcagtcaggataccttatcattatttgtccacctgtagaaggtgacacccagacaggaaatatcttacttttgtatcccaagagctcagcacagagccaggcacatactaggtgtttgtctatgtctgttacattaattaataaacaaaagaagtacaaggcatttaaaggacctttggctaaatatagacatttgctaaatatagtagcttgagtataactccctcctgtgaagacagtcacttatgtatgcatttgaccacagtgccttacaagtgttccctgcaagggccagaggtggccagtgaatcgcaagccttgtcttgatgtcagtggttatggggcagaagaatgagaagaatgaaaatttccagagtttgccttttatccactggtgtttctttcttcttttttttttttttttttttttttaacacagtctcactctgttgcccaggctggagtacagtggtatgatctcggctcactgcaacctccacctcccaggctcaagagatcctcctgcctcagcctcaccagtagctgggattacaggcacgcaccaccacacccggctaatttttgtatttttaatagagacggggtttcaccgtgttggccaggctggtctcaaactcctggcctcaagtgatcttcccgccttggcctctcaaagtgctgggattacaggcgtaagccactgcgcccagcctatctgctggtttttataaaatagattgaaaaggaaggcaagggaacactccttgggttgagagccctgaggtcctccctcccaccgagggagatgcagttggagttacagagatagacttgtgagtcagagctgggctttcaaatgacatagttcttagccagctgtgccatcctaggaaggtgagttactcactcttctctgggcctctgttttctcgtctctaaaatggagaagaagaaacctcccctggctgtcagaattaaagaaagtgggtagcaatgtaaagtatgtaactaggcggtgggtaaatatgagagcttcttacacgcccctcccggtaaaacccagccgtaggtgcagctgttactagtgctgagtagcacagattgatagggttggagggagcaggtgtgacatcttatgttttagtacaaattaacttctatttctcaactgtgaaaatgaaaatcactattcaaatggcaaatatctactccttgaattcatcagggttcttatagaaatcaacaaaatcgtcttgggttcagtactttcttattcactcattgactcaacagatacaagccatggtatccaaattcctgtcctggggagactggagagtcagggaggaacccggcgaggacctgcctgccctccaggagttgggtcagaaaggggttgacacctgtagatcaataatgctaaccgaagacaggaagggatctgatataaaaagggcgtagacagtgttctgaaggtttggacatgagagagaatcacagccggccagtggtctcagaagtggcttcctggaggaagtggcattttgagttcttgaaggctgtatgtaccagtcaagatgctttggctgctgggacagaaaccctgactggactgacattgacaaggggaagtatattggctggagcacagcaagcccggaggcagggcaggattccccgccagcctcaccagtggctccggcctctttttcccacagcacctgcgcagctggttgggctgggccatcctctgtgggtggcctcatcctcaggctgacttgcttcatggaggccagctggccttggctttcccgggctgccactgtggagcccacacaccgtctcttctggtggctctctccagagagctagcagtatctccctggtaaactttcatgagtctgtctggccactcctgcaccaagctctttgacaaggaccatggacttaggggctcagtgcctgtggcaaaggggggtgggtctaccctgtgacctgtcagactcatcctgggactggggagagccggcctccctgaaacacttgggaaggtgggggcctgaatggaaactggggaggcttcaaggaagtgggagggagtgggctgccacttgggcctggcacccaagaacatgccttctggagagtaagtggaaaattctgggctgaggtcattgggaagcctgagtcacctggcagggacgtgggttccagttcgctggagcgaggggaagagctaggctgccctgtgcaggcagggctttgcactcttctgggtagaagcaggactcgtggtgggggcagcctttggagggtgcatttctgcttctgcagccggtgtcctgcttccatgtgatggtttaaactctaggcaagcgtgtatagtaaagggagttatttgcaaatgctgtattatcgcaagtcaattatttctcactctcttgttgcagtggaattcaggcgggatgttatcaggagaaaggtttagtacgcacttgcagaagctcattagcaccaaaggcatgagctgcgcctcccacttctggggaggggtgtttccaacgcagatagattttcctctcctaccgcatttcacattctactggtgcattttggtagcatcccaaacttctcattcagcactctgcagctgagtaaagcgatactggtctcaccatgcaattcaaagtattgctctcaaatgaagaatgtttttcccaacaggaacagtcatttgcgcaggctgcattaggaactcaccgtggggccttgagacagtgcggtgagcttattatcccctggtggtgccataggtaccccttcctcacccagcaggacggaggccctccccccataactgtttctgcagcctcctctccaagctggcccctctgtggcctgcggcctcgggccctgatccatggcaggggcactgctgccccacccggctgcttcaccggccccaagttgactcgtgggcctgcgggtgctgttggttcaggcctcacagccaccgcctttcacttgagccacggccacacaggagtccagttgcggagaaggggtcgcactgcccccaaggagtccagttgtggagaaggggtcacactgcccccaaggagtccagttgtggagaaggggtcacacagcccccaaggactccagttgtggagaaggggttgcattgcccccaaggcagcctgcagccatcaagtaaccattttgtgaggtcacaaaatgtcccccaggcttgtttcaagatgcaaccaattctgtggtacgtttcctgctccggagctctctgcgggccaggctgaggccaactcctgccgagaccacctccctccccagcccttccctgactggcctgcccccctcatgcccctgctgggacagggctcacatccagtcctgccatgggctctgcttctggaacccaacataaagccatgccccttgtttcaggtagttcgtaaatatcgggtcttttcatcctaagtccccctttcattcatcttttctccctgtccttcccaaatagccctcctatatcaacctgtgcggagggagcctgtctctcttctcctcaaggctgttggagaaccaagctggggatggggtgcacgtgttcttttccagaacagcccagaagtggggttcagtgtggaaacttcgctctacctctctccagcactaacctgacctggctcctctggggtggagagtccaggactgagcccagctgcaaagatgcaaatctgggtccccaatgcagtcccttgccctctggtgaggtgaccctggggccagaattcacctgcacgcaaccaagatgtcagacttgtccctaggcctatttcacttgatttgaaagtgaatttcatgacttttttctctatgaatttgcttttctgaggctggccagcagattgcacaccaactgagtgctgctggacactggtttgccattggggctgggccctgcccctttgttccacaggagttgggagaggtgaggggcgttcagtgcccggcaggacacaggactgtccagcctgaacaacatcctgcctccagttggaacccagccgcagtggagtcactgagggctgttctgcagctgattctcctaagccaaacacccatcttggcagatcgtctacaaggttttaggaatgtgacaagactggtgttccagacggatttttaccaacagtctgagctgttggagggcgtgaacaatgtgcctgtgaccttgggctgtttgtgcgattcccaaaagatgcttctgggtttctgagtccacagaaaactcagctgtggacaggcctgctggtccccaacggccctgggccccaccccacagctatttctgtcagagggccagctgtctcccttcttccttttctgggtgactcttgagccactcgttggcctggtactcagggttgggatgtgtgtgtggagaacatgacctggcttctagccctgcctgtcccccgtgagccctgcccgtccccagtgagtgtgagacgggaaaggagagaggggcgaatggaggttgcttctaagacccaaggtgtgccaggtactctggaagctttactcccatagtttgtttaaatcctgtgaaaagagttccgagtctctctgtttgacagagagaaaacagactcagagacaccatgggacatggctgaggccacctattaattaggggctgccagttcatggcccaggctgcttcctggatcagcccctcagctccctccaagaccccattcaggctatgtcctgcaggcaagccaccttcttcctatccctggcacatgtcgtcccccactgacctgtgaaccaccaggggtgacatttcaggagagagagtcccatatctgtctctgccttactgtatctctcatcttctttttccatcctttcatctttaaaaaattgatttttatttcatcagagtaatatatgtttttacccatattctcaggccgttccccacacagtaggctgggcagtccttttaaaatatgtcagatcatgccacttctctgataaaaactttccaagggtgtcttgtatcactccgtaaaacccaagtccttaaacaagctacaagaccctcaatgatctggtaatgatctccttgtttataaataacatacatatgtattacacattagtttatcaattgcagatgctgtcagctggctcctgcattgaaggacgggacttggtgtgcatgggcccagttcaggccagctccctactttccttctctgcatcacactatagttcattgtagtgtggggctaaatgaatattcactggcaggacagactgcttaagaatatgggtgctagaatcagatttcctgggttcaaatcctgattctgtcccttataccatgacttagggcaagttacttatcaactttgtgcctcagttcccccataggtaagatgggaaagttttaggagtatacttcacccagggcagttatgagggtaaatgagatctttcacaaaaagacctctgaacaatgactgtcacatagtaaatgctcagtaaatgctggtgatgatgatgatcttgccagctgtgtaaataatgtcaattgcagagccaagcagtgtactataatctttctttccttatacaactttctgcttcttctagagttaatgatttattttctttttcattgctcatctgcctacatatctagcttatctatctatatatctacatatctccataaagttttcaatagaacccatcaaaatgctatgttctatatgattaaacaaagcagataatctatcaattccattttattctcccatggaaatctacccactagagacctctgtcctctagatccagtctggtctggatgttctcctcagggtttcctgcacctgccattccctctgccaccattctgagaatttcttttaccccctttttattgttgttgttaggtccctattttctggattccatattatctgccttcttggattgctgtcttattttgctggaacacatccttcagtagctttcggagcaagaatgccttttctaagtattcacatgtctgaaaatgtctttattctacattcatacttgattgatactttggttgtgtatagagttctaggttaaaaataattttccaaaaaatgatgaactctgtgtcttctttgacataatttccagtaagtattgttaattggaaaaagtaatatacagaaaataaagatagcatgctgttccttgtgtgagaaaggctgcaattttcctgcatttgaataaaaatcactggcagaacacaatgaaaggagtgtggggatggaggtggaagcaggttgtcaagtgccactcttcatgctcttgatatttgaaccatgtgactgtattaactagtcaataaaataaactaataaatatcaaaaaagtaaaattaggagccaggcattatggctcacacctgtaattccagcaactcaggaggctaaggtgaaagaatagcttaggaccaagagttcaagtccagcttgggcaacaaagtaggacccttcctttaaaaatatattttttttatttagctgggcatggtgatgcatgcctgtagtcctagctatttgggaatctgaggcaggagcatcgcttaagcccaggagttcaagaccagcctgggcaacatagtgagacccccatctccacaaaaaagaaaagaaaaagtgagtgggtgtggtggctcatacctgtaattccaacaatttgggagggcagtgagtggatcacttgagctcaggagtttgagaccagtctgggcaacatggtgaaatcccttctgtactaaaaatacaaaaattagccaagcatgatggcttgtgcctatggtcccagctagttgggaggctgaggtgggaggatcacttgagcccaggggacagaggttgcagtgagctgagatcacacccctgcactccagcctgggttgacagagcaaaactctgtctcaaaaaaaaaaaaaaaaaatttaaaagaaaaagtttggaaacttttaggatcttctctttattctcagaattctggatttttcccccacttattgagcattcattgggttcattcaatctggaaacttgtatcctaaaattctgggaaattttcttgaattttttcctagccccatcattttttctgttctgtcttacagtaatttctgtaagacagaacagaaaaagaagtaatttttcattttcctttcttttcttttttttttttttttgtcttttggtaatacttcaaggaagattcttcaactttaccatccactccctctactaagtttacctgttttatattgaattgctaagtttttttattgttctttatctctatagcatcctttcttgactcactaatgcagtaccttttcttactactctaaggatattaagcaaattcacttaatttgggggttttcctgaaaatttttttgttccctgcatcctggtctgtttcttttcctcctttgtgtgttttggcctctgtcatcttggagcctttctcagatgtgtggtgatcctcagctaccctttcatattttagagggaggcactaaacatggtgactacaatttgagcaaaggccaggaagagagatgtcacaaagtgtgaacaggaagccacacagggcggctgaagtgttggtaccagacagtggttcctcaggcaggggcaagcagctctgatttgaacccagtctcttgcctttgaggccagtgcccttgaccaccatgtcagtgttaggaggaaacattgcttaatgttaaccagtcagacttctctaatttggtgcctgcaggtggagttttgtttttgattaagggactagtaaggctggaaaagaaagttgaaaattaatctgagacatacaccagggaagaacggctaacctctagtgtctacacagctcaaacaaaggaacccatcattatggtattcttttactgagagcgaaataaaatgtcaaattagctgagcaaataaagatagtaaaacaaaaaaatatgagattttcatagcttcaggcatcaagaattgggctgggcatggtgtcttgtgcctgtaatcccagcactttgggagaccaaggcgggtggatcacctgaggtcagatgtttgagaccagcctaaccaatatggtgaaaccccatctctactaaaaatacagaaattagccagatgtggtggcttgcacctgtagtctcagctactcggggggctgaggcaggagaattgcttgaacccaggaggcagaggttgcagtgagccaagatcacaccactgcacgccatcctgggcagcagagcgagactccatctcaaaaagagaaaaagaagaagacaaaaagcaaaggaataattcatttatttgcttggaaagttctctaagatctgagatatactttccataaaacaaataaaatacctggagagtttaggtaggcagaatgtgatatggccttggcagcaggtaaactcttggatcagcaagtctctgagagccagatctgttcagagcctccactggcatattatattacaaactctccatccactcttggcttggggagtgaatgaaaaatcacatagtggtcatgatcatatttaaacataaagaaatcaggagatctaaagttgttcatgtatttttaacctccatcatgtaggtttatcaattttgccctcattgtccttgatttctttcatttttatttttcactttctttgatgacattccttaggcatctgggaagatgtggggttttccaggttgacactcatcgtggtttccatgctgaccaaacagctagcatggctctaccctgtcttccctaagacagcagcccccaatctttttggcaccagggaccagttttgtggaagacaacttttccacagaccagggtgtggggatggttttgagatgattccagcacattacatttattgtgcactttgtttctattattgttacactgtaatatataatgaaataattatacaattcaccataatgtagaatcagtgggagccaagagcttattttcctgcaactacacggtcccatctgggggtgatgggagacagtgacagatcatcaggaattagattctcataaggagcgcacaacctagatccctcatatgcgcagttcacaataggtttcgcactcttaagagaatctaatgctgctgctcatctgacaagaggtggagctcaagtgggaatgcgagtgatagggagtggctgtaaatacagatgaagcttcgctcactcacccgcctgccgctcacctcctgctgtgtgtcccagttcctaacaggccatggactggtaccagtctgtgccccaggggtaggggacctctgccctaagatattgctttaaattacccccagcatatttttaaatcacccaaagctgtgctgtctataggactctgtgctctgtgtctgtgcagtgcactgtggtagccactagccctctgtaattactgagcacttgaaatgcggttagtacagttgaggatctgcatgtcaaattaactttaccacagtgcatttaaaggtaaatagccatggaagtcttggggctgccgtgtcgaccagtgtagctccagagcaattcccttgtggaaatacattgcaatagaggtatgttctgcaatgtgggatatttattgactgcttacacatggggctgcataccactcatgaccaatgcaggtagactggactgatcgatggactgatctattgcaggttggaacctttgtggggctgtggcctcagagacctgtgggtcagcctttttaagttgtgtgaccgtaggcaagtgaatgcagcccagtcttcttttttttatccgagaaagaggaatgctatcgtgtggggcagtcatggtaaagagctagagcccacaggctgcagggcgtgctgcctggcacctggtaggtggcaattaaatggtggtggtcgtttgctaccttcaggtggctgtggttagctctagaaggaggcagttgtgcttcttgactggttgggatgtgccccagggctgagatgggggttgggtggagcttgtgagaaaaatataggaaagatgatctcccatgcccaagagggacacagacggcccttgggactgatgaaatgaactcagaataaaagcgcgaatggctgtcgctgtaaatatgtgtgtctttagtgtcagcgtccctggggacttcttataagtttgaagcatgttaccattcttggcattgagacagccagtgtcacttttacttcttggtcttgaattcaagcatcaacagtaaggtaccatcagatttttcaagctgcttcaccatcaagcaacctagccttggtgcccaggtctttggttggcttcccagaaataatgggccacttcaccccagccttgttctgcacggtttatctttgggcttatctgacctcttagaagctactaaattacccgcctatttttaaccaatgcctggagccggctccagaggaattgccacatgagttgagatgaggtgatgaccacatggtcttccaactcttcatttcaacatctgaagttttttctttcttttgtcttgtgttagggtttctcaatctgggcactactggcatttagggctgggtaattctctgtcctggggggcgctgtcctatgcattataggattttgaacggcatccctggcttctgcccagtaggcgccaggagctcctcgctattcccagctgtgaccaccaaacatgcttccagacattgtcaaatggcccatggggaacaagatacccaactgaggatctctgtgtcaggtttcccctgccacactgctgggtttgtaccttgagctctgaaccactcccctcagctagagaactctgagtctgacagtgactacgactgtttgccctcctgcaaggagggtaaaaagccctagctgaccacattacattcttggcgtttcctgcatttaaacctcctggaaattagtacagagggggccacataccctggaagctgagatggggccattttagaagtcggctgcaggctcagggaatggagacacgagctgccaatgtgattacactttgctggctttggaagtgtgcttgagctgacagtggggctggggaccgtctataacaagataccacagactgggggctttagcatggaagttgatctctccctgttctggaggcaggaagtccaagatctaggtgccggcacattcagcgcacacctcttgtctgcatcttcagattactcaaaatccaggtgtggctgcaggagaagggacagggaagaccctcaactttagtctcacctgtggaggtggggctggagacccagtcgtccttcaccccccaggaccaccccccagatgagaagggggactggatgttggacaacagaaaggtcagtgactgccacatttccacaggattaaaaccgtccccatatctcccgtaaaagcacattgccgaacttcttaaaatagatgaccagatcattgtcttgttcggaatccctgctgcctcagccctgggcctccgcagctctctgcacgatactctcctcatcacctctcaactgatctccagaaagtactgtgtggcccccgcccctccactcctgttcccagcgagagaagcccgagaacctgcagtctctatccaaagactcccccttccaacccctggcctctcttttcgcttggccaaaaggcgtgcatctcagcctgctgggatgggacaggaagggaccattaaccatgtgaatgttccagcatattcacctctgtggtttctacctcttgcttctgtttttatgtacaatttgcaaaggaaaacacccacatacactgtccctctcactaattgaaaattcagctttaatattctgtttggtttcatcaataatattcttttaaaaaatggtattcctcccagcactttgggaggctgaggcaggaggattgcttgaacctaggagtttgagaacagcctgggcaacataacaagaacccatctctattaaaaaaaaaaaaaaaaggccaggtgcagtggcttacaactgtaatcccagcactttgggaggccaaggcaaccgagtcacctgaggttaggagttcaagactagcctggccaacatggtgaaaccccatctctactaaaagtacaaaaattagccaggcatgttggcaggtgcctcaggaggctgaggcaggagaatcgcttgaacccaggaggtagaggttgcaatgagctgagattgtgccattgcactccagcctgggcaacagagtaagactctgtctcaaaaaaaaaaaaaaaaaaattgtgttccttttggtttaagacttagtcaatcttttctccttggatttctgtttttgtgattggtgttaaaatttcaatctatttttctttcctaaatatcttttccaatttttccctatatagaacatgatagttaataaattatactgaatatacgtgtggtgggaggactgccttgcagatccacaggttgcactctgtattaccaatagcttgtttttttaaatatgatttttaaaaatatgttaaagtataccaggtgaaaataacatataacatgcacaatatattgtacagttttgtgtcttgcttttaaattttttgagttatttcagataaggatactcctgacacttgggaggacttccagggcgtcgtcttagatggctgtgtgcttcctttcttgggcccttgcagagttcaggtttctgttggtgtgaagttttcctcctaactcccatgactggagacacttcgcacacccatgagagaatctttggggtacccagggagagtgtggtgtagagggtcagcattgggtgctgcggccaggcgacctcctcagacaagcgacaagcatctctgagtctcagtgtttccacctggcaaggggaggcgatactgggtggctgtgaggagtctatgaggcaatgcagacacgaggcttaggatgggccttcagggaatcatgctggccaaggaccgcgtgtgtgcagttgctgctgtctgccacctgtgctcaaagactttcagactcagaggccgaggcctggcttctgtccccagcttcactccaggttctaggctgcacgcctggttccaggctctaggcctcaggttcccagtcccaggttctaggctgagggttttggttctgggttccaggctccaggttccaggctaagggtttcagcttccgggttccaggctccaggctccaggttccaggctgagggtttcaggttccgggttccaggctaagggtttcaggttccgggttccaggctaagggtttcaggttccaggttccaggctccaggctccaggttctaggttaagggttcccagttccaggtttcaggctctgggataaggcctcccagttctaggttccagactccaggcttcaggttctaggttccatgtttcaggtactaggctaagggttttggttccaggttccaggctccaggcttccagttccaggttccaggctaggggtttcaggttccaggtcccaggctaagggtttcagttgccaggccccaggttttaggctaagggttcctatttcctggttctaggctccaggcttcaggttctgaactctaggttttcgattctaggctccaggttgcagggtctggactcatacaccagctccaggctacctggagagggaaggaagggctgcagggccaagtccgcccccgttttaccacctcctctataaggtgggataaatccgcctgctaacctcacagagttcacatgaggtcccgatgaggcaacatttgagatgatgcacataaagcctaaagggctttgcagctgtgagatggtggtgatattattgtcagaaaggtttaaaataaattcttaaacactcagatgtttcaggctagtttgtagctgcttctgaacatgcagcagtgtgctcatgggccacagggccgccgcgcactcgctacacctcttttggcaacgctgttgctttcctctccaattggaggagagctacaccacccagaatttgctagaaatgctgggtcttgagccccacctgtgctactgactcagaacctctgggggtggagccgggcatttgggcttctgacacacccccggacgattctggcgcaccctcgccttcagaagttctgccttcggtagacggatgccgttggtgtatctggctatacagatgggagaatccatttactctgatgttcctgattagcagagggtggctttttcctgctcagacggctgaggagtgaatgacttcggtcataaccgttaccattgctgtgaccttcccgctgggcgaagctgctagttgaggatctgctccctctcataggcctccctcccttctcccaggggagagcctggccagggcccccagcccggtgggtctgcacttggcacacagcagaccctggatcactagcgtttagtggcagaaaagtgagtgagtgaatgaatacaggaacagatgaatgaatgaatgaatgaatgaatgaatggacttagcttgacttcacataacatttggaaattctgattgttttcaaactagaacaagatttgaaaaggcttgtcagaaatcgcttacatataagtgaaggtttaaggaagcgggatttaatttggccaggtgtgggttctcagaaatgttctttttgattccccttcactctggccagggtggtttgcgaccttacccctccttcatgtaataagatatagaggggaaaattaaagcaagaaaccaaatccttttcctgtttactcctacagtttttccctctttccagttccttgtttttatggtttttcctgccttgtgtttctccgttggcttttgttgcaatgtatgcacttggaaaaaatcttctgaatgatcctagtgatggggctttggcctcattgggcgttgtgtgcacgatcgggttgcattgcacactgccggcgcgatgagctcgcactccctaaaaaggcaatcattgtgtccaggaaaactctgctaggttaatggcacatgcccaggggctgaagtcacttggaccaaggtttgtagaacatgctccgtgtggctttcctgttggggcagggggattgggccagaggaatttaggtgtattaacacagcctgccaggtgcaataaatagccacctttgcctgaccttaacctcacctaagcgccatgctcctcaagagccctgggcaccccaggagtaactgaaaacctttggaggagagttacgctggtgttcttgggttagaggcgggtggcaggctggagaattaggttggaaataaaaatgagtcagtgttggtgatgcgttttgtgaaaccggaaagcttagttagaatgatagagaatacataacctgttctcagcaactttgttttaactgacaacaggattttcccagttttcccactaatgtctcttttctgttctaggatccatctgggatccacattgcattttgtcatcagttcaccttggactcctccaatccatgacgatttctcagtatttacttgtcttcccgacctggtgcttttgaagagtagctcttaggtatcttgtagaatttggatttgtctgattagactgaagtcttggatttgggggaagaatcgcacaaaggtgaagcgccctttccctcacatcctacagggacacacggcaccaatgtggcttcttactgaggatgctgacctcgatcaccaggctgaggtggtgtctgcaggtttctcctctataaagttactgcttctccctctccctgctctggaagcaagtcactaggtccagcccacatccagggaagtggacttaggctgcccatcctggcaggaggaggatcaaagaattagtgggcctgaggttagaaccatcaccatcattagtaaatttggagagagatactcagaggctatgcagatatcctgtgtcaccctgacgtattcatccatggataggtcattcttcttttagtgtgagtatcaaaagcaggttattcggtgcaaccagtgaacttgagagcagggactgggaagccctggagttgtcgtggctcagccccgtgcccctggctgtgttccttccctcctcactgccaagatgctgctgagccctggtctcacaaacacctttgagtggtctgctcactgctggggacatggactccgacaccttcctacccctcaccgttcccctctcctccgacttgccaccgccaaagccagcagtgacaaaggaggtgccaggggcagctgctccagcaggagctctctctgtactccggaccctgacatggatgaaaacaagatatgcttgggagataattctgttaactttgtcttcttttgggaggtgtggtggctaaatacttgaatgaaggttttatgatgggtggaaagagtaacaactttcttcatcctaactcaatgtcactcttcatgatgtactcagttattcccttttagaaattatcttaaacaagggtgagcaatggaatgtgagaaagatcaaagaaatgcagagcagactaagaaagatgaaacatctggattgcagagaagggtgacctttccctagaaaatatcaacactaaatctttacaaagccctgtccactgggttctagggagcgctgcaaatggactggtccctaagctctggcctgcttctccactcctgtgagacagttaacttttttcttttccttagctctgttcctcgccgtggggactctggataacaacagacaacaacagagcccgtggtagcagcagcgaaggagttaatatgcaccatgtgtctaagcccttttcattttacttctttgtaaatttttaacatatttatttaaaacataaacatcgatattctgattagttcgcaggaacaattattgtcattagggaagatggaaatttactagctattttcctcctttcatttttaaaaaaaaatatatatgtattacatttttttcttcaacttttattttaagttcaggcatacatatgcaggctgtgcaggtttgttgcacaggtaaatgtgtgccaaggggatttgctgcacagatcatcctatcttccaggtattaagcccagcatccattagctattcttcctgatgctctccctccccaccccaccctccgacaagccccactgtgtgtgagaacatgcggtgtttggttttcctattctgcgttagtttgctgaggataatggaagccctttccttaactcattaaatgggtaaatgtttgcccccacaagcccgcattcgtattttgaagccctaacccccagtgtagctgtatttggagatggggtctctaagaaagtaattaaggttaaatgaggtcataagggtggggccctgatccaatagaattattgcccttgtaagaagagacaccagagagctcactctgcctccgcatgcacacacagtgtgggccgtgtgtgcacacagcgagaaggtggccgtctgcaagccaggaacttgctggcactttgatctggaatgttccagtctccaaagctctgagaagatacatttctgttgtttaagccacccagtctgtggtgttttgttacagcagcctaagcagactgagacaggcagatactatcattcccatatgaaaattgaagagactgaatcatagaaaggggtcgcttgctgtattgctctgttgatttttccttctaatagttttgctttctacatttactgtaatgttcagttcatcaaggctcctgaccatgatggtttgttgtaaacttccccacttaacagtatcctctgcttcctttttcctcatttgacgtttttcactttgaattctcctttctccaatgttagcatctgaaaccctttgtgttgggcaggataggccaagtctgatgctgttacaaacattctgaagacccataggcctacagtgaccacagcttctctcttgggcacactggaggccattggcggtgtgcagggcctctgcttactgtagtctcagtccctgcccaatgggacgtggctctcatggcttctgctgtcagcacagactcattcactggctcttaacacttctgcccagaagtggcacagatggtggaaaggtgccaggtgggctcctctagccaatgtgagggcctttgtacaaaggagaaaaggggaaaaagagcccacccactggtgcagggctaggagagtagagggtgtcccttccctcagatgggtgcccccccaccctgcagcagggttgagggagcagaagcggggtcctgccctgttgcctggtggccgggcactcgctgcatgcagggcggagggataaggagcagagtcctgccctgttgcccagtggccgggcaatcactgcacgcagggtggagggagcaggagcagggtcacgccctgtcaccccgtggccggccactcactgcaggcaggtggagggagcaggagcagggtcacgccctgtcaccccgtggccggccactcactgcaggcaggtggagggagcaggggcagggtcacgccctgtcgccctgtggccggccactcactgcacgcagggttttgctgtctttatgtcttcagggcatttccatgagaagtggaggctgctgccaagacagcatttcaaaccattcttgaagcaggaaccacatctgcgtgtgaatttttccagaatctgggggaagaacttacttgtttcttcgatattctaaataatcagtacagcttccgacagcagtggcctccaaacctgaaatagaggcagtgtatgagtccacgagtctttttgcttggttttgccttgcttgctttacttggattctgacactccactcgcgtgtttccacattcaattccatttgaatgactttggtgcttctcagccagctgtggacccggcagccctgagccctagcccttcccctagcagccaactcagcacccgtgttctaaggacgcaggagtctagaaatagctgcgattcagagcatgttttcccgacaactgctgattctctcctgacaccctaatgctgctctttccctattttagggattgttctttgctgaaattatgtggcacacatcaaaagtgttctacaagtgtccggggtgttcattgtaatctggtataacaagatgcctcacggccaggtgccgttggctcctgcttgtaatcccagtgctttgggaggccaaggtgggaggatcccttgaggccaggagtttgagaccagcctggtcaacgtaatgagacccccatctctacaagaaaaaaaaaaaagataccgcagttcacgcagttcaggtatttgttccgtgaacttgggggagtcatataaactcaacttttctttgtctctcttgcctgtgatgagtaacagaaaccatcttcccagaaactatccccacccacccccagcccagcccgagcagcccagacccaggaaggaggtcagagcctgcgtgactgtgtggcaaggatccccctcaaagcaggcagtgatccccctcaaagcaggcagtgatgaccaggctccccaggggaaggaaaaatggttgattaccccacctcactttctcaagttcctgaaagcctcccatcttttcaggatgttttccttctgcttcctttctggggtgatattgcaatgcatgtgtcagtcccattgttctagctgccttgaaggagttccagaaacaggcatggctggtgtgagaggaggcgtccttgtcaccatcctttgttgcctcccatctgtggtcagcacggaggctgccctgggtcttggccggcccctggagctggaggaggtgctgggccatggtttggaagctcgcatggtcccagcctcagagccccgttctctgtgacctggctgggtcaaagcctggccccagaacagcccctccctccccacccacagctgtgcccagctacgaacactgtaggccgggcgcgatggctcacacctgtaatcccagcactttgggaggccagggcgggcagataacttgaggtcaggagttcaagaccaacctggccaacatagtgaaaccccatctctactaaaaacacaaaaaattagccaggcatagtggtgggtgcctgtaatcccagctactggggaggctgaggcgggagaattgcttgagcccaggacgtggaggctgcagtgagccaagattgtgccattgcactccagcctgggcaaccaagagagattctgtctcaaaaaaaaagaacactgtggtgtgagaggcaattgtgggtcagcctgagggcacacccaatataactttcacaggtgttttgtttttctgagaagaaggtgacttttcccggttgctgtccatgcagactgtgagggatgttcacatgtcacatttctcaccggagtcctcgtcccatcgcctcctctctccctgccgcggttcggaagctccacgggggccagtgttgttcaggcctcaccagtccttggtcatgccacccgggctgagttcatttacctgctcattcatgtattcacttttcctccgattcaacaaaaaaaaaaattgattaccccccggcatgtcctaatatactgcagccttcgaaagagatgtagtcctcatctgaaaggtcatcctttcaagtgtccatccatccactgggcagatttttacttagcacattccctgtgctggggacttccccgggcactggggacactgtagtgcacaaaccgaagtccccacgctctgtgaccctgaagataaactgctgagcagacagctctgtaacatgccaagtgttggaaagggctccagaggaaatagggtggagagaggaacaagaagggcaagtggggaggttgctgttttctgtggggtgccagaggagggctcctgggaaaggtgatgttcatggcagtgggaaagacagcaggtgcaacagtggagaaggatgccagcctgacctgtctgactctcagcatgggggctgttgtggctgagcagagagatccgaaggaagagtggggagaaatgagggaggggagacagctgggggcgagactccctggggctgtgtaggcagcagtaagacttggattttccccctagcaagaggggtggctattggacagctcagacagaaacctggctgctctggcctgtgttaagaggattcctcctcgcactgtgtggaggacagccctggatggccgggcaggttacgcactgcagaagccctgggagcacccttcacactgactcctgtgtgaatgaccatcacagcctgggcggggctggctgtaggagcagcagaccagcaggggcaagagcagaagccagagaccaggctggacgttggcacagtgaccgcaggagagaagaatgttgccagaccagagtggagccatgggctgcagaggtggagaagtatttgcattctgtatgccttctgcaagtagagcctgtggggtttgctgatggattgaatatgggatgggagagagagggagatcaaagatggtcccggggttttcccctgcatgaccaaagtggatgttgaggtttgacctgtgccagtgtgggaagctgggtaaatgtcgggttctggggggaaacctggttgcctctgctgggcactcggccctcaggcctccacatcctccttgaaatgcgtatcgggtcactctggggtatgggtttctgattaggggagttcagaggcttattcacagcccctaaggtatagactaaaattaatttatgtaacatgtatcatactctttaagttggaggttttaaaaatgaattttaatttaaaaattgtcaaacataccccaaattagagaggctagtacgaagaacacctatacatctgtcacccagattcaacaaggttttaccatattgctttacctggctctttctttctttttctgggtgtctttgctcacagtattttgaagcacattccaggtgcagggtcacctcgcttttcagtgtgcacatctaaagcagcactgtgttctcacacaaccacaatgctttcacatctaatcaaattcacttgaattccttggtatcatctaatatctaaaacataataaacttttttccaattatgtcaaaaagtgtcatattacaattggttggtttgaatcaggatctagagagtccacgcatcatgtctgggtgttctgcctcctacacctccttccatctgggaagctccctccctgccatgttgctgtggaaaccaaggcactggatcagtagagcaccctacagtctggctgcttgcttccctccagtgtcatttcacttgttcctctctcctctgtatttcctgtaagtgaaaattagctctaggacagtgctgttagaaatgtaatatgagccacatatgtaatttaaaattttatattagccacatttttaaaaagcgaaatgcataaaatctattttaataatatattttatgtaaattgatacatcaaaagagcatttcagcatgtaatcaatataaaaaattgttaatgagagatgttacactctttttattgcattaagcctttggaatctggcatgtactttgcacgggtagcctctcagctttagttcacaggctcgggcgctgcccgtggctgcattgggctgtgcagctccagcgtctccaccagattctggcgtaccttttgctcctaggtggtgctgtgtgcttcctgttgtgtggcactgggaggccctcagtggtcgtcccatgtttagtgaaaagtaggtgcaggtggtgacggcggatctttccatcataaacttgtccatcatgaaagcagtggcgcccccactctctggatggagaagactggagagaagtcagggaattaaaagccccaacttgcaccttacctttcaagttcctatttgacatccacagggaaaaataaactacacagttggatctgagtctggaattcaagatctgagctggagatataaatttgggagttgtcagtgtgtcaatgatgtgaacacggctggatgagatcaccaagggcaccagtgccagtgccgagaggtcacagagatgcagaaccagcaaagggagttggacattgtcccagaggccaagtgagatgagaagtgccaaatggatataaaggttacagcaaccttgatgagagctggttcagtggagtaatgcggtgagcacctggttgatgtaggttcaagagaggagattcctcaaaaaagtgaaatagaattaccatataatttggcagttgtacttctgagtgttcaccgaaaagacctaaaagcagtgtctcaaagaggtacttgtacagcagtgttcatagcagcatatacactagcaacaaactatccaaaaaagaaatcaagaaaacaatcttggctgggcacagtggctcacacctgtaatcccagcatttggggaggccaaggagagaggactgcctgatctcaggttgagaatgttgtgagccatgatcgtgccactgcactccagcctgggctacagagtgagaccctgttatgtggtttggccctgtgtccccacccaaatctcatgttgaattatgatctttgtgttgggggaggagcctgatgggaggtaattggatcatgggggcagatttctccctttctgttcttgtgatagtgagttctcccgagatctggttgtttaaaagtgtgtagcacttcccccttcactctctctctcctgccgccatgtgaaagtgcttgcttcccctttacccttccaccatgattgtaagtttcctgagacctccccagccatgcttcctgtatagcctgtggaactgtgaatcaattaaatctcttttcttcataaattacccagtcccaggtaactgtttatatcagtgtgagaacagagtaatacaccctgtctcaaaaaagaaaaataaagaaaagaatcccatttacaatagctacaaaaaaagcactttaggattaaatgtaaacaaggaggtgaaggatctgtacattaagaactacaaaacatgatgaaaaaaattgaaagagacacaaataaatgtgaagatatcccatgttcatggactggaagaattaatattgttaaaatgcccatgctacccaaagcaatctacagattcaatgcagtccctatcaaaactccaatgacattgctcacaaaaatagaaaaaataaaataaaatttgtaccaaatcagaaaagactcctaatagtcaaagcaatcttgagcaataagaacaaagctggagacatcacactacctgattccaaaatctaatgcaaagctgtaaccatcaaaacagcatggtactggcataaacagaaacaggtggaccagtggaagaatagcgagcccagaaataaatccacgcatttccagtcgattgttttttgacacagttgccaagatcacactatggggaaaggataatctcctcaataagtgatgttggggaaaactgtccacctgcagaagaatgaaattagaccctcatctcattccatataaaaaaatcaactcaaaatgtattaaagacttaaatgtaagacctgaaactataaaactagtaggagaaaacataaggcgaaagctccatgatattgttccaaaaacaatgatttttttggatatgactcaagagcacaggcaacaaaagaaaaaacagacaaacgggattgcactaaactaaaaagcctctgcacagcaatggaaacaacagagtaaaatgacaaactaacctacggaatgggagaaaatatttgtaaactgtgcatctgttaaggggttaatatccaaaataaacagtaaatataaacaaattaatagcaagaaaacaaataacctggttttaaaatggacaaaggacccaaataggcatttttcaaaagaagacatacaaatggccaatagatacgtgaaaaaaaaatgcttgacatcattaatcatcagggaaatgcaaattaaaaccacaataagatatcatctcacacctgttagaatggctatgatcaaaatgaaaagagataacaagtgtcacaggaaatgtggagaaaagggaaccatcgtacactgttggtgggaatgtaaatcagtacagccattgtagaaaacagtatggaaattcctcagaaaattaagaagaaaactactatatgatacagtgatcccacttctgggtatgtctccaaaggatatgaaatcagtatgttgaaaatattccttttttttttttttgagacagaatctcactctgtcactcaggctggagtgcaatggcgcaatctctgctcactgcaacctccgcctcacgggttcaagtgattctcctgcctcagcctcccgagtagctgggattacaggcacctgccagcacgcctggctactttttgtatttttagtagagatgggttttcaccatgttggccaggctggtttcgaactcctgacctccagtgatcccctgccttggcctcccaaagtgctgggattacaggcgtgagccaccactcccggcctgttgaaaatatatctacactcccacattccctgcagcactattcacaataaccaagatatggaatcaacctaagtgtctaacaacagatgaatagataaagaaaatgtggtatcgagacacaatggagtactcttcagccttcaacatgaaggagatcctgtcattttcaacagcatggaggaatctggaagacactatgatatgtcaaataaaccaggcacagaaagacgaataccacgtgatctcacttcttttttttttttttttttttttttttgagacggagtctcgctctgtcgcccaggctggagtgcagtggcgggatctaggctcactgtaagcttcgcctcccaggttcccaccattctcctgcctcagcctcccgagtagctgggactacaggcatgcatcaccatgcccagctaatttttgtattttttgtaaagttgggtttcaccgtgtttgccaggctggtctcaaattcctgacctcaaatgatctgcccacctcagcctcccaaagtgctgggattacagacatgagccactgcacccagccgtcactcatcttctaatggaaagaatttgcatttataaaagaaggattgacatttgtaatttttctaagaaatggaatttacagtgccaatatagatgactctcaaatctcacatcgctgagtgctaagtgaacttcctgttgctgtgaaagttagctacaaatctgtcatatttgaagtgagttagaaagcatgtggggaagattgactacatctcctgaatccactaaagctgatttgggtgctcgttttgtgattggatatatataggacatctttttaactccctaatatgatataaccaaaaccagttctctgtattctctgtagaaaacaacacgacaggccagtgttgactgaaacccaaccacatgaacaaaaagggcaaagcccaacgctgttaaccctcaatggagataattaaagacaaaacaagagaaatactgctttatttcttactaggctgctaatgaaaaagactcacaattccacaaacagggtggacatcgctttccagtttactcttatcttttgaaatgtgagttattggttcccagtttgagatttattcactgaatcaactgtcagtcttttcattggggttattttcattttgtttcattttgattttgaccttaacttctggaaactataattggggaataaaaggtaaggggtgtctcctgataggaattacatatgtaacgtaaatatatagatacatctatctatctatatgtaaggtggcaatgcatatatgtatttaaaaaactaaataaaacaaaaccaagattgtctaggcaaatcagtgctatgtatagaatttctctttggttatttgggattgtaatcttgtctttatgcaattcaggattacactgagaaaaattaaagaaaatgtcaaaagctattatactgggcaggggtagggcatgagtttaaagatatttgagtattttcaatatatccaaatcatatgtatgcatttgtttctgcccaatttgtgaaatatatggtttatcatgtctatctaaatacttgctgaggaaggtaagttaactagtatttactgagcaactgtataggtaggattttgtctcaatttccaagcagtggttcttggctgtggccctgagctctctcaagaacatggtgcctggtattcctgcgtgcacactgagcattgtctaggacagagcaccaaatattttatggaatatccatgtgactcacgtatgattattcataaattacacattaactaccacaatagaagttaattcattgtacaatataaacaaaagtaaatttaaagaggcaaaaaatataatcagaagagcatgcattttacttcagagaactagacaaaaattaaatgtgccttgtgtcagtatgtatttttactttttaaacatttgtaagtactatttgtgattaataaaatgcaactgctcctaaaaacattactgaatttatatgtcaatggaagttcactaatataatgtgacattctgtggaattttacaatgttacgaagataacataattcatgatagaaaaccactattctaagattttcatcttcatcaaagtaaacttacccatgaaggggcattttctgaagaagagcccccaaacccttgtttgcagtggtgggaaaaggctggcggtggtagggggcatccttgcaccattttggtttcagttacagtggagctgaggttggatgaagaatcacagaaacaggtcaagtgtgaggatgcacgtaccagccaggcaggggagcgaagacagaaatgggaaacaggagcaaaatgaaacagaaataaagagaggaaaataatttaacagtgagtagacaggcaaaggcaacatatgtaaaattggagtattctaagaggaaaacctaaataaatggaacaatgaatattttcacatatgaattaataaggcattccataaagaagagtcgaatctccaccatgccccagaaaacatagagatagtacagtcactactgaaacagtctaatcgtgttttcagatggccatgataaagaggttcttgagaagacaggcaaaaaacaacaacaacaacaacaaatcaagatcaaatgggaaaatatccaacctggcctcaatttctccgtggcaacattcactattagaagaaagttatggcaatgtctacaaagccttaaggaaagaaagcgtgacagaattgttcacgcttcaaactgtcattcaaaaataaaagaggagaaaaatatatttgtttatataggcatataattccctagaaggatatgtaaaaaaatgaaattccatttttaaaaaatgcaaggattcaggaatatcgtccccataattccttcttgaataaactattgaagacaatgtcttccacctgacattgttccatggaatcactgagatcctttatgaacctgtaggctcaagccacagcccatatgaattaaattagaagctcggtgatagcactgaattatcaatacttttttaaaccccaaggttcagaacgagtgcaaccaagagataagtgaaagaagtacacaagagaactggcaatgagcgttatttaactgtgggactaagacaagcatggaaatcctaaaaccaaggagaaccacctaaaaaactgtgacaaacagtacaaggatttaggaaggcagctgggtataagctactgcccagaaatcaatagcctccatatattcatgcaataaccagttagaagacagaatggaagaaaaggcttcatatcaatagctataaaatatataaaataccaaggaataaggttggcatgagtgcaatttatataaagaaatctttaaaacactactgagaaaccaaaactttcaacagcagaaatggcataccatgttcttggataagatgacttaacactataaaaatatcaaacctcaccaagtttatctacataatgcaggtcccaataaaaatattaatagaatttcttttggtaccagatagcctggttctaaaacttgtatggaaaaattaacaagcaataataaccaagaaattttttcaaaaagattagtagggggctgtgcattaatctgttttcatactactgtaaagaactgcccaagactgggtaatttataaaggaaagaggtttaattgactcacagttcagcatagctggagaggcctcaggaaacttaaaatcatggcagaagatgaaggggaaccaaggcaccttcttcacaaggcggcaggaaggaggagtgccgagtgaaggaggaagaaccccttataaaaccatcagatcttatgagaactcactcactatcaccagaacagcatgcggggaactgccctcctgtttcaattaccaccacctggtctctcctttgacatgcggagattatggggattatggagattacaatccaagatgagatttgggtggggacacaaagcctaaccatatcagtgtggttagcctgaaggtatgaaaatattataagtctgtaattaataaaactatatggtactagcacatctcatgaacaggcaggtcaatggtacaaaacggaaaatgcagaagtagatccaaataaatgatgaacttttctatacagtaaaaggggcatttcaaaccagtgggaaaagataagttattattattattattatatctttttttaatgagacagggtctcgttccctcacccaggctaaagtgcagtggtgccatcacagcttactgcagcctcagattcctgggctcaagcaatcctcctgccacagcctcccaagtagctggtgctacaggaacacaccactacactcggcaaatttttttttatttttagtagagatgatgtctccctatgttgcccaggcttgtctcaaactcctggcctcaagcaatcctcctgccccgacctcccaaagtgctgggattacaggcaagagccactgtgccaggcagaaaaggatatgttattaaagaacagtttggggacagagagcaaaccatgtggaatacactaagttaatgcttcatacctcataccaaaataaattacaagaaagtcaaaagctggcaaatggaaccacaaaacaacaagaagaaatcaatttttaccaaaaaaactatatataattttatatatatttatattatatatgtttataatatatttatataatgtatattatatatttttatatacatataaatatatatattttagagacagagtcttgctctgttgcctaggctagagtacagcggtgcgatcattgctcatcgctgcctcgctcctgggctcaaggggtccagccacctcagcttcccaagtagctgggactgcaggcatgtgccaccacgcccagctaattttccttttttgtagagatggggtctcactatcttacccagcctggtgtcaaactcctggcctcaagcaatcctctcccctcagcctcccaaagtgttggtattacaggcgtgagccaccgcaagtggccgagaagtttaagataatattggaaaatatttcgtgtaagttacaaatcccataagttaccccagaaaagatgtttagctttgtcttacatagacattaaaatatttataaaggcaaaagccaatgttaaggtcaaaaggcagcaaacagggaaaaaatataatatttgcaacttgtgtcactaaaactaattttcacaagaggaactctaaaaagttattaagaaggccaatgatacgcgagaaggcaaaagaaataaaatagtttgttaaaaacaaaaggaactacacatggctctaaaacagaaagaagtccaaacttcacacatattagaagtattcattaaaactactctaggttaccatctgcccaccccacgccccagcacactagcagggattaggagatggcttggcaactcactgcgtagtgtagatatggggacatagggacccctgtgctgatgagagagtccacagcagctatctccacagagtacagctggccagtgtaggtttggggacatagggacccccacagtgctgatgagagagtccacagcagctatctctgcagagtacagctggccagcatctgtccacttcaaaaggcacatgctgtttaacccggaagttctacctctgggaatttatcttgcacctctactcccatgatatgaaattccaagtcatttgctgcagtcttgcttgtagcagaaaaatgtggaaacaaacaaatttgtctgccataaaggactggtcaaacctgttgccatccatacaaggagtgccacgagctcctgtgcacctgtggaaggagctctgagctagattgtttagcaagaaaagcttcaacacacaagttcagtgaaaaaagcaagggcagaacagcgcacggtgctacatgtctgtggcagaaaaagggagaaaagcatgcgtttttgagtttatatattccatcaccttcaatatacagcgtcgggacacctgaccacctgcaggacccactgtcatcctgggagagggaggaggaagctctcggatctcctcttgtgaaagaggcgagattattgctcagcctggctccagaggcacgcagtccctgtgccccgagaaactaacatgccatctctgctctcccaccgcttcctgggttgggctgcggggagaggccttgctacagtgggtgcctcatcagcactgtgaacaaacagggaaggatatctggggccacgcagggagaccctgggggatcctgggcagaagcccctgaagtgattgagctgtttcctgggccctctgatgattctccctctgccttggaggcttggcttcccctggctgctgctaattctggaggacacagtggggtgggccacataatggaggctggactgtgtgtccagtccacccagatgccaccatgcctgccagtccctctcctccttagagcacaagccctctgatgctcccagacagtggaaactttttgttccccaaagccctccagctggccgggctgccctccccagactccctccttccttccagatgtgagcaaatccctttccttccacctcgctctcggcccctggttcaccttctgttcctgcccagggcaaactgccctatgtgcatctctgtcctcatccatgaaaccatccttgtcctcactgtcgatggaatttttcagtgatacctaacatctgtcccagagccatgcacgttccgaaagcacattccagggggacagttgtgtccctggtgcaacacgggagtgggcacacattctctgtgctgtgcatggggacagctccaggaagagagagggcactgttttcctgtttcctgagtcaatccgctgtagttctgtggcccagctgagtggcataggctctcctgacccaggtacctatcagcccccaaaataggtgttgccatgattcctttggacaaaatgtaaaatctggctgaagactgagtcctcgtgcacctagcgtgacccatgacagcatgcaggtgttggtctgtagggatgccataacaaagtgccacaaactgggtgacttaaaataacagaactgtattctctcacagttccggagaccggaagtccaaagtcgaggtattgggccaggtgggttccttctggaggctctgaggggaaggtgttccaggcgtctctccagcttctggtgctgctggcagccctcggccctctggcttgtagacacatcacaccaggctctgcctccgtctccacgtggccccctccctgggtatttgtgtctctgtgtgcaaatttctgtttccttataagaaagtcattgaatgagggcccaccctaatctagtacgacctcatcttaacttgattgtacacgcaaaaagcctatgtccaaataaggccccatccacgggttctgggtggacatgaacttttgggggatgttactgaacgcagtgcagggttcttacattctcaccatcacgtatatgattttattcttcagggtgctaaggtgtggtgtgtgccatgtgctcttaaccccttagaaaagataaggacaatttttttttcaggtccaatgtctgaatgtattttttttctttctcttaggatttgaagatatataacaatatgtcataaactgacctgaaatccttgtttgttccgcagcgaaatccattaataatccctataactgggacagttttatgttcccattctcggtgtggctatttatagtgaaacctcactttccctgtgttggttaacattaaaaactggaactgcttctgaggtaggaggcgggacttgactccagaggcggggcttggacactgggccagattgaggactagctaaaacaggcccggtggggaaagcagtcttcaatcagacacgcccaccagcgctatgtcaatttaccgttgccatgacggcacccaggcattaccgctcctttccacggcaatgacccagtgattactacctcttccttgcataaaccgctccttaatctgcatgcaattacaagtgagtataaacaggactgcaaaactgccctgaggtgctgctctctgcctgcggggtagccctgccctgcgggagccggcagggagctggaacactgacacttcagtaaagctgttttcttctacctatgacttgcccttgaattctttcctgagcaaggccaagaacccagatgggctaagctccactttagggctcgcctgccctgcatcagtttaactaaactattagaatttttagtttaaaagaaatgagtaagattgtgagcattctgtgagatgcggagtgaaagaaggtgctgtagtctgaacgtttgtgtctcccctaaattcatgtatagaaatcctaaccaccaagctgactgtattaggaggtgggagcttttaggaggtgattagggcatgagagtaaatgagattagtgcccttataaaacaaacccggggagttctttccccccccatcccgccatgtgaggacacaatgggaagggggccctcaccccttctatgaacaagaaagggggccctccccagacactgaatctgctggcaccttgatcttgggcttcacagcctctggaactgggggaagttaatttctgttgtttataagccacctagtctatgcccttctgctacagcagcctaaacagctcagccttaatggacgaggcacatggaatgacttccgggcctctgacagggtgcttggggaggatggtgtgatgttgcgttatcactcacagacactgtggaactgactgggttggtggagcggggacccggggaagagttcagttctgttctgggaatgttgccttgaggcagctgagcactacccacagggaaaggtctggcaaaggttcacgtgcattcgcctgggccataggggagaggggagccgtcagcggtcagggtggtcaaagccacatagttgcatgaggtctcctaagtaggtcagtggagcagagtacccagggtggagccccgggaacctcagaaacaaggaaggggtgagcagaggaagggtcgccctcagggcactgggagggaggagcagggtgaagggtgggggcagaggggaaacagccatgtccatgctgcagagagacccaagggagacccggggaagaatgtcacttgcaccttgcaaaagggagggtcctggcggcctcagccagagccgttttagtgaagtcatggggagaaggaccacagaggcttagtcctggctggggccgcagtgggactggcagtggagaggagggggcccaagccagggagattgagttcttggcaaagaggccggcggcgttctccactgcgtttccatccgcaggtgcgcctgccgcctggcctgtccacagtgtgctggttgctggtattcagttctggattgtacctctgactggactgaggtccatcagcaaatgacggggcctcggcggtgtggcagtgtgttcagctgctggcatgccgcctcgggaacagaaaagtcacgttgttgtgtatgcgggtaacagctccagggaggcgtgaagagaacttcctggcaaggagtgctgctccaagactgaatggactttttttgaagtgcaagggtctggcctctggaagggtgtttttgctgccacctttgaacttctctgtgagtttttaaattttgagcaaatcgccttttataatcattctatatgtactttttctacccaacggctgcatagtgttctcttcccacagctgatgtacttaagccccatccttctctggtataaagaacgttgcgatgaacatccactggcaatcatcttcctactcatctttgattgttgctagaagggaaattgctgggttcaaaggatgctgaccacttgttaagactcctggagcacccagatttccatccttcttaatctcgtgttccattacattgcagaatgtagtgacagccaagaatttccattcataaaactcaatgtagggttttctttggaagctaacaaatgacttcaggcttgtcatcagaccattgcactgtgctgactctgaagaatttgtaagttcttcacatcactttaagaatacttataattttacttattcatgaaagcatttaaataagcttcttactattaaataatttcttattgtgaaataaaccatttacttcattaacttatgttttttaaaatcaatgaaactaaaattctaaggttaaagaaaaaattctaaggttaaagtaaaatacaatagtaatttagcttaaaaaaagaaaaaatgctgattttcttatttactgatgtgaattctcaagatgtttttgtattacttattgaaataatgttaatttctgagcctgtgattttgaacaaaacatgtataattgaagtaatctataatctgtgaaacaggtatctcaatttttctcaaaggttttaattagaaagtcagggttggaatccactcttcacgtaagaatgagatggtttccagagataccaacaagccaacacatcttaatttgatgcctttttattatcagcaaaatatttaaaattggggttttattctgagtaacttatttcatgctatgaaactgccaaaaacaactacaaaaataaaatgaatttatgttctttataaaatgttattaatatgaaaaccggacactatgtgaaagcgatattgtgtttatgtagggagagtgtgttaacatttttttcagcatggctgagttggctgtttttgaatttgaaacttctgcagtctgggtagacagtgccacctccctgcagcaaacatgggcatcccttactgttctgaagaccctcaagctgcagtcaacactggggtcgtttgtggaaggattctttcttgctgtcttgatttgcaagaacacctctgaaggtctttgaatagtaaatgctgtttccatggcaactgcagtctggcttcagtgatcccttaacctgtgtgcctttggctcaaagcacccaggagctcacggccttccccaggggcgtccccctcggtcctgttcacaagcatggactctggcatggacggccccaccctggctgcaccaccgattgtccacatgacctcaagcaggttatttggcctttctgtgccttccttggaaaaatgggtctaatacgtgggcttgttttaagaattaataagagaactggcacacagcactcggcacagtgcctggcacatggaaagctcttgagtcgggctccatcccccaaatcgagcacctcagttgtctgtaaatgggcgcattggcagtcctgtgcagcaatgcaagatattcttggtttttggtttcttttaaattctttttaggtttcttttaaaatgatcagcagtctttgatgatttatgagcctgtgattttgaacaaaacatgtataactgaagtaatctataactgtgaaacacagggatcccaatttttctcaaaggttttaattagagtcagggttggaatccactcttcacctaagaatgagttgcttcccagaggtaccaacaagccaacatgtctttggtatgttattcttcttgctcctcttcttgggtgtggggattttcatctcttcctggagacagggaggccctgagaggtctcggtggtgacgggttgcaggcaagaggagtgaagcaaaccctgctggtactgcagaagccacacggagtgaagagacatgtccttgacgtcatagagtggagtgcgctttctttcttttgttctttcgttctttcattctttctctttctttctctctttctctctgtctctttctttctctttctctttctttctctttctttctttccctccctgccttcctgccttcttttttctttctttctttctttcttctctttctctcgctctgttcctttcttttttccctccctgccttcctgctttctttctttctttctttctttctttctttttctttctttctttctttcttgttaaatccatatcacaaagcattttcacagatagcttgtttctagttgttttttttttcactttaagttctgggataggtgtgaagaacatgcaggtttgttacataggtctacacgtgccacggtggtttgctgcacctgtcaacccatcatctagattttcagccccgcatgctttaggtatttgtcctaatgctctcccttcccttccccctgacctcctgacaggccctggtaagtgttgttcccctccctgtgaccatgtgctttcactgttcacctcccacttatgagtgagaacatgtggtgttctgttcaccattcactcagagaacatgttggttttctgttcgtgtgttagtttgctgagaattgtggcttccggcttcatccatgtccctgcaaaggacattaactcattcttttttatggttgcatagtattccatggtgtctatgtgccacattttctttatccagtctatcattgatgggcatttgggttgattccaagtctttgctattgtaaatagtgctgcagtaaacatacgtgtgcacatgtctttacagtagaatgatttataatcctttgggtatatacccagtaatgggattggtgggtcaaacggtatttctggttctagatccctgaggaatccccacactgtcttccacaatggttgaactaatttacactcccaccaacagtgtcaaagcatggagcacacgtttgttcattcattgaccgttccctgtgtgtggctttcatagtattcatttgggatcctgacgtgaaatggcctaaccagggtggagtggcagttgtgttcccggcacaggactggcccagcccccgagccctgtagcttccctaacaccattcactcaggctccgtcagcctctcccgggttcctgggcttctctgcttgttttcatgaggtttgcgcctttctcctatgccaatttacagtacaccctttagcagctgcagccacatttggctttacaacccctggatgccctcatgtcctgcccagacccttcttttgaactccacctgacaacttgacacccccctttccccaacactcttcatcaccctgccagcagctgctcctcctgcatttctcatccccccacctcagagctgcctgagccggggctcccccgagcttgttcccctcccctcctcggtgaaatcgtgaagctggctgaggcccctcccctcacatagtgacctcggcagcctcccagtccatctgcttccaagattggccccaccacacctgcatcttcatcttggtgtcctagtgatcctaggacatgccagccttgggattgaaaacagcagcctctctccccaggacaaggccccgtcacagctgtccctgtgcctgtcatcatggccccctgaaataaagtctgccttaccatcttcacaaaaggagaaagaaaacacaaccctcatgctatggttccccgccttaccatccttaatgactcccatagcttccgggatacattttaaagccatatgatggcaccaggggcctcttagccccctccttcctgcctctctcccatgggggtcttacactccagttgtaccgagctactgaagagcgtttcccatcattttccatccttccagcctcagttccccctcctccaggaagccctccctgacttcctcggctggggtaggaacattcacactagctgcttattatcctcacagcatttttcctgaggtttagcttacaagaagtctttctgttgaataaatgaagaaatcagcaacaagggtaattgttgctgaaagaaaatatttattatattaaacgtaatacatgtttattatagaaaaataataaggaaaattcaggcaatagtagaaaataaaaattatgcctcatacttgaccaagcacaatacctgttaacattttgtttatttttctccattcttttatctgtgacttttttttaacatagtctcaattatgtgtctctaaatagcgcatttttaaaatctcctttttttaaggaaagaaataagcgtaactcttgtatcaaatgctctgtaaaaatgttttaatggccacaaaatatggctttgaggatgcaccatcacgtcctcacttccgtattgctggacactgaggcttttgtgtttgtttactgcggtgaatagcattgcagtgaacatctttaagagtgaggtttttctacttcaaattatttccttaaattagaatattagaagtgcaatttaaaccccaaacctacaaacacggttaaggacctggagctttgctttcctgaaagggtgtatcagtttacacttgcatttgtgttgtctgagagtgtcttgttcatcacaggattaagtactgtgattatctcagctttgtaaatttgacagctaaaaactggcagctaactgattcttaggtatctcaagttctttttcaaatcgtcaaaacgtgtcttagagtgagtgttgatattttcttgctgatttgtggattgcttattaacctttttcatagttgttgcaaatattttttttcagtttagattaggaactgaatatcttcctcatgtctttaaagaaatatgcctgaccaggtgcttgataaccctaaacggagtttcctgccgggctttctcttgtatgatgttgaggccgtcacggtttgttgagcagaggagtgagtgctaaaagctggagttcagcagaaccacagtgatgcctccaccccgggtaaatgcttaaccacactcctccctgtaaaaataacggtgtcattaaacatggaccggctgttccatgagctcattcctaggaaacagtggctgagtagcagaagcctgaccggtctccatttccgcccaaatgtgggatgtgtgcacgtggcatagagcctcgcacgttgcttttgggagaatcagcttgagtcaacttctggcaaaagattggggccgtctttggacagatttgaatattagacaccatatcatctaatgaaaaccagctgggaagagtcagttttcctgtgttcttgggcatttgacaaatggtgggagatagttctaattttagaaaggaaaacgtaatgcatattctcatgatgatttgtcaactggatattttgcagagaggaaaacgtctgaaatgtcccaaataaagctatctgctgtcatgagaacacagctggcagggcagaaagcagtgtcgatcaacaggaggtcgtcctgcaccgggacgtcagtgccccgacacctcggtgtgtcccttggctgtgtggccttgggcaggtcactggtcaagcctgagataatgacattggtctgctggggagcagcggccctaggccagatgtactaggaggccccttcctggctgtgattttaagatggaggggaaaatgtttatttgttctgtgaaagccaggggtggggtaggacagagccagcaacaccgacagcccatcatgctgagccagaggtctgctgagctgaattgaagctgtgtcaactacagtacgtgcctcaccgagcctcagtttccacattggtgctgtgcagatgataatacagactttgcaaggctgttgagacttacctgcactaagacatagaaagtgcccaacacagcgcctgcagggccagcactcggtggcagtctaaggaatgtctgtcacagcgctcccagatggcaggtcctgcctgcctgggcccagctctggctgtgtggctcaggactatgggacctctgcaggctgcgtcccctgcctgcctcagtttctgcgtctaagctagaaagcatgattgttcctccccgtggggccgttacgagaagcaagcacatggaagcgtgccaggcattttccgaacgtctggaacatcctcagcggcagggtctcctcctccctctcctcctcctcacttagaaatattttccctgggagtcccacggaggtcgtgaagatgacagaggctgctggcactaacagctgtgtggggcagcccaagcccctactttgaaagttccattccatccctcgcatttcatctgaagagcgctatgttctccctggggagaactggcctgttgcatatgaagagtccagagattttgaacaagggaaccccttcagcttcgaatgaccattaccgttgatgatcccagaagttccctttccaagcagtgacccatggacttgtgtccctcgtgtgataacctgcactacacacatatcctacaagtgtccatagtggttataagctgccacagccatacagatctgagagccagaggccttcaaaccagctaaggctctgaaacacttcaactccacttaagaaaacaaatcggagcacatccgtgatcccacaaatgctaatttgcttgtcacacatcagaaacccaggaaggcacagaatagatgctctcttactggcttataggttgggtactttaaagttggagacgtttaaatcagagataaacctattgtaacaatacatttcatgtcatgtgagccttttgtcttccagcaactaaagggaactgtggtaggatgagctggggtcacagggacaaggaagacaggtaaggggacggaagccggggcagcaaggagtggctcaggagctctcaccctgcagtgggcagctcatcacccctgctccccgtgtctgtgtcccttcaggagaagctggccagggacagggccaccactcatagacagctcctcagcctactcagcactgctttatgtgtctgtgtgcacacacgtgtgcatgcctgtgtgtgtgcaggtgtgtgtgtgcctgcatgtgtgtgtgcacatgtgtgtgtgtgcctgcatgcatgtgtgtgtctgtgtattccttttgaaacatactagatgccctctctaagtaaatcacatttaactgctgtaactaacccgtctggcaacatcttttcttaatgctttttcactgttcaccgggttgagggtttcttttccttatttccacttctgcttctttaacgaaattatatgacttgatacagtatcattcttttcaaattcagtgtttcagtaaatagttcttttcagcagacaattacttaggcagaagtagtttaacatagcatttgtctctgaaaaaaatgttttttttcctttctgtctagatcctttaaaatatataatattgcatcatatacaatattggcctgtaccaagcacctgtatccagaaaagtaaaaaagctaactggcttaaaccacagcagaacctgccttgctgggtcaccttccttcagttccttctcatggtttctagaattccttgagcgcacacagcaagctagctctacaatcactttagagagtgaggatcgatgccccagcttcttgttttcttagtggctttttaaaaaatagtagacagtatatagctatctactggcaataggaatctcttaaaatcaaggtgagaaatgtagttcttttgcaagagagtcagagttttgtgttcaatgaaaatttaatatttgaaaaataaaagatcttaaaactattagttttccattatgatcagatggctctgtcaaaatggaaagaaagcagggaattttctgtactcctcaacacaaagtttatcttgttcctgaaaaaatattgaaccattttttcaatatttgtccttgccaggatttcaccctggcacccgctgttggtgtgttttaaatttggtttccttctgattcttctaagagaatatctactttatcatattttgaaataagactttacagtatccaaatgtggatgatatatccttttaactatgtccctgatattgaagctctgaacataacctctcaatttgagtcatctgtgtttccaggtattgctatagctaagccacaaaatactgaattttggcgtcttatatagatggttgcagtgtttccattcttcacgaagcatgagaaattcttttacaatacgatgaccgtgctccgtcgttttaggcgaagaacagacttaccacacactgtgctttctctcactttgtgagacagtgaaggagggaccttctcttcaggtgaaatgaaacccccacacggattagcctaacttcttcagctaagggctgggccttcttttattacaaataccgttgcatctttatacactgtttcagtgaaaaaaaaataaacatggcaattccctttccaaggctctaagtcaccaccaggcggcataacagacctctgtgtccctggtctgtaggagatgggacaatgcggggacagcgctgggagggcccgcaggcagcaggatgccagggcctcgccaggaagccatggtaggcgcccggggggagtctggacgtcaccccattctcaaggtgaagcctcgccagggtctcgccaagagagctgaggggtcagattcaccttctccctgcacctctgcacttccctctgggtttcctgtctgtacatccagtgccgcgcgtggcgtggggcgtggcgtggggtggttcctcacagttaccctcgctgggtgtgcggttgtctgacatcagtcctccccagaaagtgcggctgcccccggtcggtcgttctgtctgtagctggcgtggtatctggcacggcggaggccctgggtccgtgtttgtggatggaatgaatcaatgtgtgaatgaaggaagtcacattggcagcagtggcggggagggtaccgtttggggacaattcagatcattctgaggagacatgctgaggcctgctctaagacagcagctgtgggagggcacggagtggcattaagagaggaagctgactcgatgacgggcggagaggtgggcggaggctgtctcaggagcgccagcagctggcagtgagtggtgggcgtttcctgacactaaggctctgtgcagagcgcgtctacaaacactgtctattgtctcgtttcatcctcacaacaaccacccctatgaagttgtcactattattgtctctcctttacacatgagtctgggcacagggacttcaagtgaagcctgctaggaggcactgctgctgcccccgcgggaaggaaatgcagggaagggactcagggggcagcaggaattctgctttggatctgtcacatttgaggtgcctttggggcttccaggaagaggtgtccagacggcaggggctgaggcttggaggagtcaggattggaaatatgaactgggtgcccatcaacatctaggtcgtggtcaaagtgggtggtggggtattacaggaaagagctctgcagccccccagaatcctagcctgcgcccgcagatgagcaggggcaaggacgcaagggcagttgtgcattttccttcttttctgtggcattcagaaataggcaaaatgtgatacactgcaaaagtgactgtttgctatctgcaggagtggccatcagtgttagttaaatgagagctgtgcagaatggcatgtgtttgtcctcttattatttttgctttaaaaacctgttttaaaaccctggtatcaatggtcaattatgtgactttcaaaagcaaaaattaaggaagacaaaagaactgcatttgacaccttgaaaggcccagagggattcttaaccttgggtccaagaattcccccaggggcctttggatagatttccagagatccccgaaactgaataggaataaaagggtagcattaccttccattatgaatgcgggcaaaaaccttcggtagtattagaagtgtgacctcagcaccaatagaaaccacaggtatttctccgtcactttcgggttgttgctgagagctggggaaatggtttcatgcatcactgtcagtatttggtggaataaggacgtgcacgcacgtgctggctgttgaactgttgcctctccactgcaaaccctcccttccttgctgcagggccagagctgtgccctatcgggccctgcccccagagagagcctgggcagtgggaggagggagcccggagcacgctgcttcctgcctgcttcctgtttctgtgagcgtcaccccagcaacgggatttcaccctggctgcagttgttggttctgtttctagtgtttttcacacgcccagacaccaccctcaccagtccctcctgagcccccgctctgaggtccgggtccccactccaagccttctgggaccatcaccccggtctttgtctccagccctagctgttcctgagatgacgcctctgtggtatgaggcctcctttgctttttcggccaagcaacacctgtttaggggctgcctgtattgcttctattgaaatcactgctgtaatttctttttctcctgacttggctctgattgatacactatatcaggatttaaaaatattttttgacaatgtgtttcagaataatcagtttccttcgtaaccctatgtttcgttacatgcgtttaaaaatattattccaagaatgctccacaggcttcaccagcctgccagggggatccactataccaaaaaacagagagctgagagcagttgccagcctgattaattgccgtttcctgggctgggtttaaatgcctctaggaacacaaaacataaagggttttctttctgttcttcctccctttcttttcgaatgaagttatggaaggaaatgaactttgttattttccccctttaaaagtagtacctgctcatggaagaaaaaagaacactggaaaagaaaagtaaagaaaaaaatatctctatcttccttgtgacataaaaacacccatggctccattttgatgtatttccttagggccttaggtgttgtttatttttgcagagatataattgtcataatctttgtcataagcatttccaattctacttcatacttgtcttaaacactatttttatagctggacaggatgctgtaaagcagtaggttgacctggcccttttcttataatgtaaaactttgaccataattttattgtgataaaatatttctaagatttaccattttaaccatttttaggtgtaaagttcagtggttttaagtgcgctagtgtgtagccatcaccatcatccacttccaaaactttttcatcttcccaaactgaaattctgtacacattaaacactgactccccaaattcacagagctgaaggtggagtgggcattgctttccccagcccttggcaactcccatgcaactttctgtctccatgaatttgattaacgtaaatttttactactgagcttcgcttttccaataaaagttcaaggtacatagtttaaatgtacatactttaatgcaagcagtattgcatgacaccagcctgccttctttcgtcctttttaaaaaattagaccagaaactgttgttgaatcccatgttgccggtcctgatggttatctttctagtgagacccgaaaattcacgtggggacatgacagctttccattttcatgaattgcaaatgtggagggctcatggtagggagatggttttatttttgtgggttttgtttcgttttgttttttgagacagagactcgctctgtcacacaggctggagttcagtgacacgatctcggctcattgcaacctccgcctctccggttcaagggattcccgtgcctcagcctcctgagtagctggaattatagatgggcaacatacctggctaatttttgtatttttagtagagattgggtttcaccctgttggccaggctggtctcaaactcctggcctcaagtgatctgcccatctcagcctcccaaagtgctgggattacaggcgtgagccacagtgcccggcccaggagatggttttaaaacagagatgtgccctggttgccttctctgaaagtttctctccacacagatctcctgacctttggtgtggctgatttcacgtggagtctgttggattcgcaccatctggctcctgttttctggggaaactctgcgctggctttcgtcttcctccttttgtgattacataaacaaaagggtaaattgttttcttaaacgttagttttaaattgtgctaaaatacacataacaaagtttgccatcttaactatttttaagtgtacatttcagtgacatcaagtatactcaccctcttgtgcagccagcaccaccagccatccccagaacttcttcatcttgcagaactgaaactctgcccccattaaacgctgactccccattctcttctccatccagccctggcacccatcattctactttgtcttgatgaatagtatgaggtacctcatctagttggaatcatacagcatttgtccttttgtgactagctgatttcacttagcatgatgtcctcaaggttttctcacattttagcagatgacagcatttccttcctttttaattctgagttaaattccactatgtatctatactacattgtgtttctccattcagccatcagtggacacttgggttgcttctacctacaaaagaccaaattattttgtccatttaatataagttatttgaaggccaggcacagtagctcatatctataaccctagcactttgagaggtcaaggcaggaggatcgcttaaggccaggggtttgagaccagcctaggcaacatagcaagaatccaatctctacccaaaaaactaaaaactacataattaataaaatgtgaattatttgaagtttcagtgcagatcccttcttatcactgtattatctgatattatcgagccaccatgaaacctctagcacagcctacctgtggtaccgggaggccaccctcccagccacatcggggtctgcctgatttctgctttcctcactgcctgggtccctctgccttcccccagagacgaagatgctgcaagttagacttggagctctaatattgtattctaaatgtagggcatatattttaaataatcgtagagtgttagagctaaaaaggtttaatatgctttatattaaaaacatatttatcttgttaatactctgagtccattgcgtcacctcgggcggaccatttcccctttttctaaaacctacaccatgggagggtctctttgccaaaaaggagaagttcatgagcttccattgcctaatatcattctttggaggcacagtcatagctccttatctggctctcgaagttcaagtccagctgtctagatcataactttcaactaggaaatcaccgggtgccttaaaaaaataaccagcgcaaagttcaggcctcttgttctagaaaagtagtaaggttactcctactagagccacgggatgtagaattccagttactgttggggttgtgtgtgttttaacaggcacacctctttccctgcagcagggggtacacagcaggctgtgcagagtagggcaaggtagaagccctggggtatgcaggaaggtgggtggggaggggctggtgtgtcagggacaaatgtcagctcccacatcccttggtaaagtgtgactgggtacatcagatttagattaaattatcctgaaactatttttttttctttttttgagacagagtctcactctgtcacccaggctggaatgcagtggagtgaggtcagctcactgcaacttctgcttcccaggttcaagcaattctcctgcctcagcctcctgagtagctgggattataggcacctgccaccaagcccagctaatttttggatttttttagtagagacaaggtttcaccatgctggccaggctggtctcaaactcctgacctcaagtgatctgcctgccgtagcctccaaaagtgctgggattacaggtgtgagccacagcaccccgcccctcaaactattttgtagcttgcattatatagatcaaacaccttcattgcacttacatctctagtattgtatttacttaaataatgattatcaatagcaactcatttaatccttataaaccctgggaactgggtaccattatccctcccattttacagatgaggaaactgaaacacaaagagaggatatgtaacttgcccagcgctgaagactcccaccaggcacagcgcgcctagaatctgtgctccctgtcaccacagtagacaattgtactccagcatcaacaatgaaaatcacttttcactgacttaagtattattccttctccaagttgatcttccactggtctaacttagattctagcctttaggcaagagtatcttgttatgagacgtgtaatttgtttcctttcaggtgccttgcaacacaactctgtttatctcataagcagttttaaatgctatttaaattctgacaaggctgagtcctgtactgtgtgattacagagcaagcactaactcacaaagctactgtgtcctgattatttctctaattgtagagtaatttaaggaagaaggaatatatcagcaataaccgtaaaatgatgatgataatggcagttctgatgttcatacccaacaaagaaatcagcaatataactactgaaagggtgtagataaaatttgtaaatacttgcggattatgtgtatgtctaatccaaaaagtcagtctcaaactgagagttcagtaagatagtttgtaataacagaaacaaaaaaccaaagcattcctatatcctaccgtaatgatttttttttgagacggtgtatcgctcttgttgcccaggctagagtgcaatggcatgatctcggctcactgcaacctctgccaactgagttcaagtgattctcctgcctcagcctcccgagtagctgggattgcaggtatgcaccaccacgcccagctaattttgtatttttagtagagacagggtttcaccatgttggtcaggctggtctcaaactcctgacctcgggtgatccacccgcctcggcctcccaaagtgctgggattacaggcatgagccaccgcgcccagcctgattttttaaataatggaaaaaatgataaaatcccactcaatgttgcatgtaggaataaagaaaaatgcagggcctatatgaagaccataataatttactgaaggacatagtcagttgaaaaatgcagagagcaataccttgtctctgaacaagaaaactccacattaaaaagacacggatccatccccaaataaatgataaatacagttggccctttgtgtctgtgggttccacattcatggattcaacccatctcaaatcaaaaatatttgggaaaaaaaaaggctgggtgcagtggctggccaggcacagtggctcaggcctgcaatcccagcacttgggaaggccaagatgggagggtcgcttgaggccaggagttcaagaccagcctggtcaacacagtgaggccccattgcaataaataaataagaaaatatttggaaaaaaaatggatggttgcctctgtactgaacatgtacagacgtttttcttgtcattattctctaaacaatacagtctaacaactatttacatagcatttacattgtattaggtatgaacaggaacctagagatgattcaagtacacaggaggatatgcacaggttatgtgcaaatactccaccatttatgctcagagacttgagcatctccaattttggtatcccagtggttggaaggggtcctagaaccaatgccccttgaataccgagggacaactgcataatgcatttcaaataaaatctcagtttagaggggaaggttggttgaaagcttaacaaatagactctaggccagcgtggtgacacatgcctgtaatcccagcgctttgggagattgaggtgggcccatcacttgagcccaggagttggagaccaacctgggcaacatggtgaaaccccatctctataaaaatacaaaaattagccaggcaaggtggcacaggcctgtggtcccagctactccagaggctgagatgggaggatcacttgagcccaagaggtggaggctgtagtgagccatgatcacgccactgcactccaggctgggtagcacagtgagaccctgtgtcaaaaacaacaacaacaatgacaaaaagaaaaaaaacaaatagactcctgagttaatctggaagaataaatggagaggctggccaagaaatttttgaaaaaacataacaggggtagttttcaacttttttgtagcccacagcttctttattcaaacacaatctcacctccctgttcaaatactttcagtgggtcctttactgcttcctgaataaagtccaagttccttaacctgcgtactgtaaaaagagcattctgacaatatccaagggtgttcaaaaagcaatgtttacaactcccacagttctaccacttcggcagagcagccctgtgtttattctgcatgtccttctggtctttgcatgcctatgtcttttacacagtcctattcttttttttcttttttgagatggagtctcgttctgtgacccaggctggagtacagtggtgtgatcttggctcactgcaacctccgcctcctgggttcaagcgattctcccacctctgcctcctgagtagctggcattacaggcccatgctaccatgcctgtctaatttttgcatttttagtagagacggggtttcaccacattggccaggctgatcttgaactagtgaccgcaggtgatctgcctgcctcagcctcccaaagtactgggattacaggtgtgagccaccgtgcccggccgcagtcctattctttttttttttttttttttgagacggagtctcgctctgtcgcccaggctggagtgcagtggcgggatctcggctcactgcaagctccgcctcccgggttcacgccattctcctgcctcagcctcccaagtagctgggactacaggcgcccgccactacgcccggctaattttttgtatttttagtagagacggggtttcaccgttttagctgggatggtctcgatctcctgacctcgtgatccgcccgcctcggcctcccaaagtcctattcttaattgtgttcatctgaggactaagaactccacaagcttggctttgggaatagcagtaaagcaacaacacagtgctgggctcgaagacggacagctgcctgaaagacggcagaagctccctgagtgtgccaaaagcactgatgaagttttaaacctagtccaagctaactgagtgatgctagaccttcccgcaacttctctaacctggatgtaaattgtaattctagagccccttgttttgcgggaaaaaaataatctgtgtatggtcaaatagcagatggaatgagctgccagacggaatcttttgccagtgcaacggaacaaagtacttgttcatgccaggctcaggtcccctgttacttgcagtcctccgggcagtcctgtctgctggctgtctctctccctgctttacgtaggaagctggaagaggtcaggggatttccttgaaattacaggctagtgaatggcagaacaggagctcgagcctgattatctgctaaacctctgctttggagctttgaggccttctgcacaggtcacttgcattctctgtgtaggggtgcagggttgttttctctcccatcggcttactcttggattgggccttcccagaggtgccgagaagcaaaacccagttctttgatcttctcacttcagctgttctttcttccagccaacttccaggattacatcccttggtgtgaccacaccacatctgaaatctcaactccccacttcccacccagtgacctgcacctcctgtctttcaatgctcctggcgctgactttcttgccgtccctgacaagcagccctgccttcaagttctcactggatgaaagaagaaggcaacagatgttagatgccgtgtgcacatattcccatcttgaccattctttctgtgcatgctttgctgtggaactgttggggccccatccagctgtataagctgagacatgaatgtgcttccacagtgtgggcacctcggatgcaggtacaggcccctctagatccagggccacttggcaatgtctgagatatttttggttgtaacagctggggtggagagcgctgccagcatctggtgggtggagccaggaacgcggctagccatcctgcaatgcacaggacagccgcccacgacaaggaactgtgcaaccccaaacgtcaggggaccctgctctttatcaatcctagggtttcccaaaaagcccgacagcacatttgatacagatgccaccaacggggtggagacaaggggcgagggcttcagtggaatctcagcaactaaaatcaagccgacggtcaggtcagagaagcatttggaaagcctccagtgcgtttaggggaccacgccctctcatcatgccaaggcagctgcccagtgaggtacagggtataaaggtgacgtggtcaggagtggctatttgatctccagttattccagaatttccactctcgtgccaagcatgtctctccaaatggctgctctctggcgttcctcacactccccctgaagttcatctaagatcttcattcttcaaaggtgaggcttgtatgttctatgtccaagtcttctctaaagatatccaatttgtacacatggagaacattttttgtactcgaatagttgatgactttgctttgagctatctctcaagggccaaagtgcaaaagggcaaacccttctattagagtgtgggtctatgtttttagtgttatgccgaagtgtgttttagcctttattttcctttatggaaattcattttcttggaaagatcattttggggatgctgttttaggatttctgtaccttcagctggaaggatgctcaccgttcctgatgttcatgtctgcccttcagtcagggagcctggaagccaagttgcttagtggcagtgctttacttttaagccttcgaatacatcttgagtaccttaaacttctctgtatgctatgggtactgtttaaattcagattatggagtcctattctccccacacttcttttttttgtgaatgacatttatcaatgacatttgtagcgtggtggattctgaagttttcagctagtagcgtaaagatttatttcatggctctgactgtcaggaatattctcttttctagaatgttaaactcataggcaggattactgaggcaaagccacataaatgagggaatctctggaaaaaatacattgcttttattttgtactaaaattgccattttttttttttttttggccaagtatagtggctcacacctgtaatcccagcactttgggaggccgaggcgggtagatctctcgaggccaggaattcaagaccagcctggccaacatggtgaaaccccatctctattaaaaatacaaaaaaaaagtagttgggtgtggtggcacacacctgtagtcccagctacttgggaggctgaagcaggagaatcacttgaacccaggaggcggaggctgcagtgagccgagatcacaccactgcacaccagcctaggctacagagcaagactatctcaaaaaaaacaaattgccattttctattcctaagtatatattgaagcatttgatttatttcttctcagtggggtatactgttagctggtgaatgcagttgttgaggatgaagcttatttccccatgtcagcatctattctgaacattttaaatgaactattctgagagcatgtatagattttttttttcttcacaggagagctgccttaggaggacttttcagagtttgtgcctgtaagactgagaaatacataatggattttagctgtcgtgtttttagaaggtaattggtagatatttgcagtgcattgtcttcatgaaaaacaaaattgggcctggtgcggtggctcagacctgtaattccaacactttgggaggccaaggttagtggattgcttgagcccaggagttcaagatcaccctgggcaacatgctgaaaccctgtctctgaaaaaaaaaaaaaaattagccaggcgtggtggtgcacacctgcaggcctagctacttgggaggctgagttgggaggatagcttgagacaaggttgcagtgagccaaggttgtatgtagtgagccaagattgtgccattgcactccaacctgacactcaacagtgtgagaccttgtctccctaccctcccccccccacacaaaaaaaccccaaaaatcagaagtggttttcttagagatgctttactggaggtgtttgtggccatttccttggctactgtgtatagaggaggttactgtggtcactctggtatggacttaaaaagcatcaattctgtggaacacactgggaaagcggatacatttaggattgctatagacttattcctagacactttttgagatgagtttaattccagagtaaaatacattagaaattattttaagtatgcctcagagtgtatcacaaaacaacatttaatggtgtaatgtaacgccatggaagggctctgagctcaggtacagtgcaccttgactgggacacatacagctctgaggcaggtccttcaatattgggtcctcctgctccttatcctccctcaactctgccatccactcttcctgcacaggaagctctgcatctagttatctgccctctcctggccactttggtgtcctcattcccatggagctcacaatcggatcaaatcctgagtcagtacaagatgccagtgcctgcagctcccctccccgctccccacacccagcctttggtcggcagcccctcaggccttgccccacccactccatcttttctcactgtcctttcagcctccagacaggctcacatctcttccatccttaaaaaccgacaaaccatgaataaatctcccccatgcaaagccttttccttggtcccgccttccttcaaggctgccgtctaccatttattacacatgcacaaatcacagaaaatgtttaattgccaaattttaatggcagaatgtaatgaccagtgtttttctagttgcaaattaaagtctttcctgaccttgctctcttcactctgtggcttccaggagatgtctctattttctgactctctaactaccccttctctgtcttgacttgttcttacacacctcttatccttcccatgtaagtgtctcaaggttccttccttcaggctcctttctgttctgtgcatgctgcctgattttatcatcacctttaactaatcggtagtgtgtgctgaggtgcctgttagactcctccactgaggctttctgcctccaattcaaattcagttcaatcaataatcaaacccatcaccttccttagaaaatctaaagagatttaaaaagcaaaaacaataaaagacctattagatgaaaaataagtgtgatgaattgctgggtgctaggtagttatgaaaaaatatcctaaagacatgtcatttttaaaagagtttctattcccaattgctacagaagtataaaatactgaagatcaatgagaattaatgacaattcatcaaagtcctccattttgttaggaaaaccattcatccatctatccatctacccacccatcatttataaggcacctaccatgttccaagcagtgagaacatgcttttaatcgggagagcccattcataacctgggggtgggggctgagggaggtggtgggagaggttcagtacccaggtcacagggcagctgtgggaaggctgcatgctgccatatgtaagcccggcactggagctgttgtggatgctggagacaagctcactgttgctttccagacgctcttgctcttctgtccaccggaggcagtcaggaccctggcctgagggccaagaatactttgtgcctgagctggaccagctggccgtggggtaccaccttctttgcagacagcaggcagggtctggatcccctgcttgatgctcctaccagtgcccctagtcttactgggagatccggctcctggcattgacctgggtgtgtgccctgctttgccagtgcccctggagtgggaggtgtggtcactggtccaccaggaagacagctaagggcattcgttgagtccacgtgatgactttctgctctgagtgaggcccctggatggctgggaggaaggaagcagctctgcgtcaggcggcgtgccgctggtgcattccatcatgatgtgctaagggctgaggagacctgggttgaaaacctagcttcgctcttccaatgtgcatctgtggacaagtgctataacctctgtgagcctcagtgtgtggataaagtctgttgtaaactgaaaggtgctgtgtaaatttcaagtgatcatttcatgagccacacgtataacagatgtgtttttagatattagtcaaagggatccaaataggccaggtgtggtggcttacacctgtaatcccagcactttgggagggtgaggcgggtggttcacttgaggtcaggagttcgagaccagcctggccaacatggtgaaaccccatctctactaaaaatacaaaactagctgggcgtggtggcgcacacctgtaatcccagctactcaggaggctaaggcaggagaattgcttgagcctgggaggcggaggctgcagtaagccaagatcatgccactgcactccagcatgggtaacagagcgagactccatctcaaaaaaaaaaaaaaaaaaaaagaggtgatccaaataaagcaataacatgaatgtaagctcatggtttgtagaagtaatttactgacatttattctgctgtcatgagtatggctagtgattcacgttcatgaaaaacagatgttagggctctgatttagaaaaatgacttcatgttagttatctgactaatggggaggctgagagccactgtgtcctccccgtctgccctcagccttgtgttgtcatccctgtaagggtttgtctctgtagccccaaaccacagtgggaggcgcagctagtgaaccttgcaacagactaacaccatggagacaaagtaaaccatgtttgggtgtggccccaaattggctaactgttctggcattttctggttagctatgattctgatgttcctagaacaaaattagaccatgctactggcctttcgttcttttctcaggagtctcctatacttctgagaatggatttttagatttcagacatgtaattttcattgagagggcacagaggaagacaaagttatatcacaggcctggcaacttttaaggatgccctctgaggcagtcagacaaaacccaaagtaccctctcagtgcagagattctgggcttaaccagtgatgtcgggaggtcagttctgtgtgtctacaggccattaactgcagtttggaaggggccataaattccaaggcacttgttagaaggggctgtccctggatcatccttaccaaaagaaggaggaagtcaagccctggtcactgacctctcagctctttagttaagaccctgggccccatgctggtatggtccagatggacccccttttttttttttttctttttttttttttttttgagacagagtctcactctgttgtccaggctagtagaatgcagtggcatgatctcagcttactgcaacctccacctcctgtgttcaagtgattctcatgcctctgcctcccaaatagctgagattacagatgtgcaccaccacacccagctaacttttgtatttttagtagagatggggttttgtcatgttggccaggctggtctcgaactcctgggctcaggtgatccaccctcctcggcctccccaagtgctgggattacaggtgtgggtcactgtgcctggccccagatgcaccctcttccgaggaaaccccccacccccctgctcagacctttccaaggtgccctcggggttttagttttgtcttcgaggtgtatgatttaacgttactctgccaagccatctttagagctgtgagtactgggatgaacattttgtgtatctccatgtttctataaaatgccacctttcagagccacacccacaccctgacttctgacccggccttcccatgcgtcaagtttgtgggttccagtcacccattcaccaccctcacaattgaccttgctctacgttgaaaaaaaaaaaaaagactgggggtgggagaggggactacctcagaagggggcttcaagaaggggactttaaagttacctgtattatttaggttggcgtaaaagtattgcatttttcgctgttaattttaatggaaaaactgcaattacttttgcaccatcctaataaaactgggaggcaactgtggatcctctgcattttattcctggggctctgggatctaaaaacaccaagaaagatgtattagcattcaacttacagtatagactttgctcttgagctggggatggttctgagacttccacctcacaggactggctgggctgaaacccaagtcagaatgtagcatcctctcatctagaagggtgtcaggatggcagttttctttaatatgctactacttagcagaatcagaaaccagccattattttattgctggtaatgttcatttgttcctgggactaagactcatcagctcgctgcttcttactctgtgagtgtcctggcatggtcccctccctgccacctacatcctctgcagcagccccttcccacagctgttgtggcaggcagtgggtttgttctctttcctgggctgcccacagtcttgctgcctggcccatcccagttcttggtctggtgcccagcttccttcctgctatggaggaggaggaggaggcctgggcaccttgagtcagggcacctaccaaggggactctatctggaaaagaggggactccagaggcagcaaggcaggtgctggtttgcttttactggactcccaggacactaggcagcaggctagcagggcagctcaccctgactgtgcccagcgggatccccgtgttagagcctttggtcctcaccctcacagcgggcactgtcattatcaccggcatgttttgggtaagactccaggcacagaagctaagtaacttgctcaatatcccttagtgagtggcagggccaggaactgaacgaggtggcttaattccagagcccacttcttaatcccttccctgtatggttttcagaagctggtaactagcaattgactggcagcctgggggttaggaaaatgtgtcttgtggcaattacaggtgtcttcaagcattgcctcagggacatgccaagggaacggaaaccagtcccagtaccctgctctgggagatgtggtcacagggttcggggtgttgagtagctttagaatctgcctatctagatcagaatattcaaaatcaagtctcagaagaagagggctgttttattaatgggttatcattctcatcagtgaagttgtgaccactggtaaaagtctaactgctttctacaataaattcccagagaacatttaaaattattttctccaaataattgcactttaaacaatcaagaattgtgataggccaggcgcggtggctcacacctgtaatcccagcactttcggaggccaaggcaggcagatcatttgaggtcaggagttcgaaaccaggctggctaacatggtgaaaccccgactctactaaaaatacaaaaatgagccgggcatggtggcaggtgcctgtaatcccacctactcgggaggctgaggcaggagaatcgctggaacccgggaggcagaggtcgcggtgagccgagatcgcgccattgcactccagcctgggcgacagagcgagactccatctcaaaaaaaaaaaaaagaaagaaagaaagaattgttataacaacatttaaataagcgttacagggagaaaacaagctattgaaaggtaggcatttcattatctttgaaagttgcttttgtgagcctgagatgctgtcaatcaaagacagcttggcctctgttcatcttaagttcaacgtttcttccccagcggttctctaggcctttgctcggcccctcttttccttctcccctatccctcccaagtcgtccttcggctcctcagcacccattttccctgctgcacaccctcctgacaactcctgccctgaagccctgggcccgggtcacggcgggaaggtgagtgctcacaggcgcgagctcacgttaccaagttgggtcagcgtgcagagaaaagggaattgggaattggagggctgtaaaatgtaaatgtgctttaaattttacatttcctggcgtggccaggacaggctgaccttccgattacaatccgcgtcatcccgtcgcttctgcccccagcctggcgaggtcgggaaccgtttcccgcaggactttcattgggagttacgagggcgccctgtgcctggaggtggcgcgggctggagccctcccggaggagaccggcgcctggcagggggtcgtcgcggccgcagcctggacggtgtggaccccgggttctgcgacgccagatcggccccagcggcccgcacccgcaccctgcaagctcgttctcccctgcgggccgccgcaccgggccaaggggggctgtgtgcacgcagctgcgtcgtcctggaagtcggcccttctcgggatgccgcgttagtggggtgcccggccggcaggtgcagcggtgctggggcctaggcttccgcgtccaggaagctcagcgtggcctgagggtgatggatgtgggggagccgggaactcataccctcgcccagccccgggcaggtccccccccggaggggaccccctcttcgggtcgacccctactgggcgcggcatcctccccggagcgcccgcttcccacggcccctgcgggtggagctgcggccggagcctgaggggtcttttcctccaggtcctctttccggcgggggccggaggggtggtgatggacagcccgggaggggcggggcaggaccaggaagatccttccgagacggagcgcggggggcggggcggggctcgcgttaagggagcgcggaagggcgggacaggccgtggggcggggcctgggtggggcggagccggtgggggtggggaaaggggcgtaaccgggagggaccctccgaggcggagcggcgcaggggggcggggaaggcgggtcatggggcgggggcggtggggcgagtcatggggcggggacggggcggggcgtagccgggagggcccctccgaggcggaactgcgtggggggcggggcgggccgtgggacgggcggaggcgcccgagtcccgcttccccggcgcccttccaccccgagcccgactcagcccgcggccacctgcgccccgcccctgtcggccgcgcccgagcccagcgccgcgagccgctccccggcgggctggctcctggccccggaagcgcgagcgttcacttagcggcgagtggctccgtctccgcggacagagcgcgcgccccctggcccggcccgcgaggggctcccggcgcggtccccgagcatttcccgccgggtggagcgggccgagcccggcaggatgaccagccccgcggccgctcaaagccgggagatcgactgtttgagcccggaagcgcagaagctggtaagaggaaagcgcttccgaaactttctttcgtgactgcggcggggtttcaggggcttccagctcgttccgaggtcaatggcaggcgcaggtgcccgggaggcgtggggtgggctctggcgggaccccagcgcggtgggagcgggcgcagtgggcgcgggtccgtgagtggcccggcgagcggcgtccctcatgcgctaggaagcacgctttattgtgggacgccacctccaaggacgaaaaggcacatggtctctccccgcccgaggtgatgggctgcagacaggctctgaccaggtctgcgcctggcctggagtcacagggagctgctagtttgctattttacaaaatacagcatcaaggaccgggtggccagagccggtgccctcacccgctgttggaaccaccggggagcggctggggtgctttggagcactcaacccgctcagcacctggggaccacctccgccgaggactccagacgccaaatccactttggctagtctcccgggtccgcccagcgcggacaggatcctgcctctaggattttgccgttgtccagctcaatatgcagtcgtggggctacggctgtagtttggcattaaaattgggcaggggatgaggcggagagggtttgcaaatacacattttcatgcagcttgtggttgaacatgaatgggaataaaagtgaaagggtgcactttggaaaagaaatataaaaccctagctttccacttaatcaggtgttcgtgggatcttggtaaaagtatgagccccaaacaatcactctttcatcaggtagaaattaatcatctactgggtgtgtgtgtaagatttaagatgaatcagactgccttgaccttgggagagcttattaggaaatgccagagagaggtgtagaagtagagtctgatgaactcatactgaaaagccagttctttgcttgtcagatggttgctgttttttaaatgtccattttagtgtggtttttctgtgacttcgtttaaaactctggcagtgggccagccctctggagccggtttttaccccttcaactaattagttcctaggggcctgggaagagagacccttgaatcaccatcagggaagggttcttgaaagaaggaagggtgggaatgtggttgagcggtgccagtgttctgaggagcagcctgggacaccatagatggcaggaggaggatggaggtgaagagctgcctgctggacttagagtccttggagaagggaagagtaaacattgagaacaggatgtgaggaaactagggacaggctaatcagaggagtaggtagaggcacacctggagcagctaaggcactggctacagggtctattacttaaggctgggagcctcctgggcgggtctgggttcagatgacttcgagatgctgccgggaggaagggagaggaaagtctggactgtgtccaactgagtagttatgtgatcagcccaggcccactgtccctcacccccagttccagaacccaataagctttgaagaccggaaggtttgtgttttgttttgtttttataagtttgtggcagaattttggcagtgagacttgccctgtccaatggggggctagttttggtcttcactgatccctctgagtgtgaattttcttacgtttctctgcagtcttgttgatgtctttgattaagggctgctactctgggttgtaccagaatatatggtgtatgcatcttactacgtttctaatgtccaaaaatgctgaattctgaatcatggccccaagggttttcagagagaagttgtgaacctgtaggagcttttcttggtaaatggtagcaaaaactgtatcagagtgagacatggtgaacaaaagcaaaatgcagttcctgttaagaggctaatgttcaggtagggaaggaaatgtgctgagtggtgatgggaattgggggtcatcatgggtggggggtagggcgtcacccagcggctgccctgggccatgggctgggtataggcacaggaaagtggttgtgggtgtttcacactggtttgtgccagttcttgctctgcattgtgtccgtgggttcagggatgggtctcctgcggaaaggagggactgggggccgcacccatgcagaggagagccgggttggtcagaggaagtagatttggcaagctccacctcaactagaagacaaaagcaggatctgagtgggagcctgggcttcttcagcaagtgggcaccagccctggagctgtaggagagggtccgatgcggacagtggagacactgtgcatttctgcagcttttgtaacttccctgtgtttgcgatggcttgtgtcaccccgctctctttccacatactgattagcattcagcccttctaaatgaccagcactgtcccaagaaagggctgttaggggagagcgtggacacacagtctcccaagtcccatctcattataggtacctgggccagggtccccaggtgtgggagagtggagtcttgaccaatatggggatgaatcagttggcacgaggcgggctggccctgctctagctcagtctgagatggtggagcgtggaatcatatggtgtgtgttttaggcatgtcatttccccgggcaggtaagacataaatatagtaaggtaggtcttttctagtagtattgagagtgtcctactggggcaaagatggagactaaatttccctttttctttaagagtcagtttctgttcagcctgagttaatatcccacagcggaagcctccttagcaaatttcaaaaaaccctgcagtctcaactgccacttatgctgagcacaggaaatcaagttatttatagttgcagaacggtgtttcagcgaagttgattggagagttacctgattatagtgagattcttatccaatccctacagaattgtgagactaaatgttggtgcagcatgtttggtcctcaaaaggcaatgtccaagaggaacttcttatccccgaaaaatcaggctgtgtgactcagcaaaggaattgtttatgactggttactcatatgccagtgcttccagaatatctgctcgtatttaaaggagtgatcttgaagccccagaggccataatgtttagattaccaacctcttcaccaatcagtaagtccattacatctcactacgtgttagacatgggacaggagaagaggatttttattacctcactgttattactggaggccgcccaaatttgttttttgttttttttttttaaataaagaagcttgttttcatggaatggacttactagaacttttattattcagactacctagataaaattaagtaaattcgtttctttctcccaaattaaatattttgactacatgcaagatttaatcattcaaaattgccatgtatttgattatagaccagtagtataatccccctgccccaggccagattccaaaacaataaaccaaaacacacacacacctggcaacagaaattatatgtattccgagactcattcattcattttggaaagggccagtgtttccagtggtttctccttgggattgtaactttacaactttaaaactaggtaagtagttttcccttgaatctaaagtataactactttgtagtagagaagtaatttatcttaaatcactataatgaagatttactcttaattttaaccaaaatgtttcatttatttgtgtaatgaagatgatcaaagcaacgccacctgtgatccttctgtcttttttactgtatgtggcacgtggctgtgtgattttcctagggaaaggagtgggctttccctgtgggttgagaacctctgtccccctcctctgaagtttccccagtttttcctgcttctctgctaggtgggtgccttagcatgcttgtcttctcatcgtgcttctaaacttctctgaaccggatttatactcttaggtcagtagctgtcaaagaagacactaagtagtgaaagtagctaatatttaccaaacccctgctgcgcccacctggtgttttatgtgaaggtcttctctaacccttgctgtaacctcatggggagcagatcgttttctctcagtttttcagataaagaggaaactgaggctcagaaaggtcagggactttccaagccctcacagctagtcagcagtggagccagttcagacccaggcctgctgactcggaactggtactgataactgtcaccactgtatgcaatgctgcaggcaggggctggcaggtagtaaatgtgcaagatatagctgtggctgccacggctgctgctgctgcttttgtcgctgttgtcagcttttcttggcagccctgctgtctcataccccagtattggggctgaaggatttctttttaccaaagctgcctcttaggacagaagtccttgtcttgaatgcatactgggaagtcttcactctgtcaaacttttctgttctctgcctggtaatttccagacagaagagaacattcaaagaacgaacttactttccttctttttttttattgagacagtcgtgcttgattgcccaggctggaatgcaatggcacaatctcagctcactgcaacctccgtttcccaggtgcaaccgattctcctgcctcagacctctgaagcagctgggactacaggtgcctgccacctcacccggctaatttttgtatttttagtagagatggggtttcaccacattggccggggtggtctcaaactcctgacctcaagtgatcctcccatctcggcctcccaaagtgctgggattacaggcatgagccaccacacccggcccaatgagctttacttttctacataaggaaaataatggtagaaatgaaatagctgtgaaacttgttttgctatttttgtaccatgctaaaatgttaactactgcttatgtcggcatacacctgagagctgctgtgatttaagcctttttatttttctgggtatgatgtaactcctcccctacctcatccaagtagataagttcatggaggataaacatgacagctgctgtttcttttatagctggttccagggaatatccactgaatataggaaagattgtcagttgctgtgtgctgccctggtgctggtggagctttcagccttcttctcagaggaaacaatttaaatgtttttgtgaaaccctagaggtctggggtttgtaggacagtcttgagcagagcaggcaaaggtgaagggagtggagcccagacgtgctgcctggagggaaacctgtcacctggagaggaaacggcacaggggaggcccagccgccctcgcctctcagtcccgcacgtctctgttagtggtagtcatggttcttgtatttccatcatgttgaggcaattgaaggaaatatgaagattcattcatctcaggaaaagcaagaaatgtattaacagcaagagtagaagttcacttgcatggaagatactgtatagcgtatttatttcttagcgccagtgggagtagctgctaagcccaagattgtgttgtgaggtttgaataggtcaatgtgtgagtcatcaataaagtaacatcaatcattttgttcccgattaatacgtttgctattttaggatgcgaaggactttaaagaagcttattattctgaaaagcaaagcctggagatttccagtagcaaaacagacacagtctgtggacaatctcagtgtacaaataattcacctctggcatgaacccaaagaatttcagaggggaaggaagctcttaaagattacgtcccctcctacttctttaatgagggctggggttcaaaaaccgagtaacttatccaggctcacataactgtaggtgacagagcccaagctggaggctgtggctgggtcttcagactcctttcttgacagtctgcacctgcataaactcagacctttactgagaacagtgcagccatagctgagagaagcagtcggcacccagcatttcttggacttgtctgccaggtcccccgagtgcagaggacagtgtgctggctcctggggcctgtgggcccggccaggagcagccttgtaagctaaagccttctttgaaggtggccgtcttaccgtaaactttcatggtaatttcagtctactccataatttgtctgagttaattttgatggaaacatagtgttttaagtaatcagttaggctttgatctctaactttatgccatccaaatcttcatgatggcctgagcaccaggcacccagacctgtgctctgaattgtgccggggctggttcatacagtgtgatggagagacgagagatccacactggagttctgaagctgtggttctcaaccctgtctttttacaagttccttaacttccttactagcctgaaatgaaatgcataggtgagaaagtcaaccagcgcacataatttcgagtcaatataacatttccttaaaaaataaaatacaggtagtttatagtaacataataagaattttgatatagaaatactcaagaccaagtacaccagcagttgaatgcagtgatgagacctgcacacacctgtgcctggcgtcacagggaggctgacacaggtgtgttgcactgagacccacacaccacccctcatgttgctgtctatgacgtgacattctacaaagttgactaactctcaggaaagttctgaacaaagccaagtatcatcatcttccttcaatttccatgtcgattgcattcctggaatagttcatgtatatttgaactgtgtaaaacatattttgagtttatatgtaagttgcaatcagtttgtaaatccaaaaattaaaaatagtggtttttcttttcttttttttttttttctttttttttgagatggaatttcgctctgtcgcccaggctggagtgcaatggtgagatctcggctcactacaacctccgcctcccgggttcaagtgattctcctgcctcagcctcctgagtagctgggattataggcatgcgccaccatgcccggctaattttgtatttttagtagagatgggatttcactatgttggtcagactggtcttgaactcctgacctcagatgatccgcctgcctcggcctcccaaagtgctgggattacaggcgtgagccaccgcacccggccaaaacagtggtttttctatcttcctgagcagtcaagggaaaagttcttcccatcgcaggcgtgtctgaatgcgggatggttggccgacctggccctgcccccccgccccaatacccttagcttcttcccaatctttttgacatcccagtccccccaacatttccaaaatgccctctaagtcaacacttccgccactgccagctgccaccccagagtgccctgtgcctggtaacgatcgttctcacagtcatggccgtagggaaggctctttgtggttcctgggggacttcgtgagattgcccacatgagcatttcttttggaactgagatacagtgcacatcgcctctgggggacatggggtggtgggtacacggaaccgaggtgagcctcccttgcgttgcggaggtgctagccttgtgccgtccgttcttgtccacgtctgtgcaggagaacatcacccggcccacttggttgctgtgaatagcaaactttagaggccactgcatctgagggttggggggtttgcagagaaaacaaaagttggtggctgtggctacttcctatagcaaagtggctcaggaaagggatcccgtgtcacagcctgggtacaccacggcccctccaggagcttgattccttcttagctcaggggaagaatcgcacaaggaccgaggcccctgcttgtctgtgaacaaactggcctttgtggccacttcaggcttcggctgcatcatattcctgtcacattcacgtgagtgaacttgaattacatccttaacacttttccaaaaaggttataaactagactggtgatgtatcatggggcctagaaaaataatgctgctgctttttcacttctctgcttgacgctaaaacctggaggcgaaaatgaatgtgtgtaattaataggagaacttcctcctgtttgcagagtgctttacagctggcaaacggcttctctccctgaacagccccgtggggcgtcatttccatctgacatctgaggagagctgctgttcatggtccagtcctctgtccattggcccactgggtgtccctaatatgcgctaacaggctcctggcaaacggcgggcatggcagccacgaatctgcacatgagctgtatgccctgggtctcccctgggctctgcggggggaggtgggagccgcctctggttcacatgcggtgctttccaggctgcagggccttctcagcctgggtggaaggagtgacgtcagagtatttctcaggaactgcctgccctaaagttgtggctcataaaccccttccagcttctgtgtagaattctggacccctagggtatcaccacagagtttaaaagcagagtaagaacatttcctgtgactgtagggtgagaggccctgggatctgtaattctacactaggctggaatcccagaaaagcttcaatgctcaggaaatgtatgagcagtgccaggatcccctgaaggagtgtggggcttttgaagcaagctgcccagcgagcctcccgcagcacctgctgtccctttgccagcagtcagggcccctgccccaccagtgttggttgtgtttctgttctttgaggagaccacatgatgatcttctggtaggagccacaagaaggatacaaatgccattagagctgctagagccccagacgtcactggaattggggttcagggtgttgggctgtccccacccttaggcagtactcccactgcctacaacacctccagcgcaggctgaggccatgcgaggatggaagcacatgtgggctaggccaggagggcgtgcgggagggctctccactctgcgctccgctggggtttctccttgtgtcctggtcaataacttcttctctctctggttctccttggcctgagcccccagcctgagccgggctgtccctgagttccctgacccggaagaagggacggccattatctttgggtgactgtcttcttatagctgggaatctctggggctctgagcgggaggcccatggggagccctggaagaacaggcatgggttagactgtttacctcactgccctgtgtgccctgccccggtagaagccgtttctgctgtgtggttctgtctagaactagagcccctcagggccctctgcatgccgtggggtccctttgcaaagcacctcctaacatgtgcttttatctgtggctcgggatggggatggtgacttcttcacgcagtcttctgcaggcctctccagcctggctcccgagatgtcacgcatgggtccatgcagcccagaaaagaccctgcagggggagaagggtcactttggtgcctatctccccagctggcctgtgggctgggtgcctggcagatggggctcccagggaggtgcccccatagacttgggctccacagcaggctgtggggctggcattaatgtggctgggagagcctggctgtctttttagccatttgtttcggaggccctgggggtcatacttgtgcttcctcgtgtatttttagatctcttatcaccgtacacaccacctccctatcagagggctgtcatattcacatatggtaaaataagacgcaacaatagaactcgagtcgtggttcggctttctaggattaggacaaggaggcaactttgatagtaaatggaatctttttttcccagccatccccaccctcaaagagtatcttgctgtaagacctagttcctgtaaaactctgtctgtggggtccctggccaggatgggtgggatcccagggaaagggccaggctgtgtgttctgaacaggaatggttctggaccaaccattgtgggcattcctgagaagccagggagcctggatcttgtcagaggagctcctccctctgctccatcctaaccccgcgggcagcagcaggaactgagagaggacacggtgggggcagcgctgcaaaacccagcagcgggccaccttccagcagcagaaagcatgagttttggttttggggctcttccatttccttccttcttttctttctttttaaatttttgctctttgttatgaaacagcagccagaccgagctatgcatgtcctgctgcacggcaggggcccttatcttgaacgactccacatactgggcaaggaggtggcagggggaggggcttgtgggaacccagatctgggatgggactcagccaacagtttaaagagccctgtgcccccactacccagcctcaacaattgttagcttatagccgtttacaccccacccaggttatttgaagacaagtcagagggagataatttcactgtactcctaaatgttttagtatctcagcaaagattgtatgggcagagaaaggaggcttcagggtgtaggaccccaggagcaggcaagggcttgctctttccctgttggctcctgtagggtggggacagaccagcccccatgaaccctagcgagggccatgccaagaagccgctgttctaatctaatcagtggaggatccagcaagctcggatgggagggaaagaatgactcaacctgcaggccgtctggggtatgcacagtctcgtctcctgagttctctgaagccctttgcagtttttgctttgtatcctaaactccacaggcccgaaccctggcactgagcttgatccgctgcagcccagcccgttcctgtccccatgctggaagcagcctgtcaactcacttccttggtttcctgttgctcttcccaccccatacctgctccccacatttctatcagagccctgtttctaaaacaaaagtcagattccgctgtgttcttaaaacccttcagtggttctgaattctttcaagacgaggttccagatacggaggctgagggcgagggtctgcaccccaggcgtctgcactccttgtcaccagctcctggtcgcagccaccccggctctgcttgtcctgtttcagggtccggcttagggctcctgtcctgcggatgccttccccagccccccggggttgggtcaagttctccagagcagcccccgcccctgccacacgtttcttcccccatgtggtcctcatcacatgtacattgtcaccaggtgctttgcctgtttccctggagactgggcacccaaaccacatttcagaaatccctcccactgtctcaagcagtgctgagacagcatggcacgttcacagcacagtgcattcctgtggcctccccgggccacggtcagcccacaggctactcacagaaagtgacaggccgtgttcagaagctcttcaagcagtctgacgtggctgtggcccgtcatgagattttatattttacaaaagtgtcagtcgataaaggatttgtcctgcgccaccggagcactggcctgaggtgccctgatccccgagaacccctgcctgcacagtcagcgctctccccaatgtctgccatctgccgtgccctgtcaggctgctgtgccattcttcgcagtgtctctggggaagaattttgtcgaaactctgcagatgttcttttttttttttttttttcaaggcagagtctcgctctgttgcccaggctggagtgcagtggtgcaatcttggctcaccgcaacctccacctcccaggttcacgtaattcttctgcctcagcctcccgagtagctgggattacaggtgcccaccaccacgcccagctaattttttgtatttttagtagagacagggtttcaccatgttggccaggctggtctcaatctcccgacctcaggtgatccgcccacctcagtcccccaaagtgctgggattacaggtgtgaaccaccgcgcctggccaactctacggattttctctcaggcatcttaagcaagtggcaagagttattctgtggctaagtgtgtagttttgtgttcgtgaagatggtcatgcataggttttgtgccagtttaaatgctggctcatatatttgttggtgttgagttaggcagattccaagaattgcctgtaagctaagttgccacttccggtattgccagcactttgttttccacatatgagtcatgtgaggatcgtaaggggggtagatgttctagaaggcaggggctgcaaggatttggaattgtattcagtgacaaatggacttctttctgaattctaatgtaaggtggagatcgccatagttgacctgtcttggaggtgggcttgcgtgtgtccccatgaggaattgatgccctaacatgattcatccatggggttcctttatcagcccaagcccatgtgcctcccagcaaaggtcattgttttttagtctttaaatgtcattatccccaagtgagggacagggtaaacctgttaggctgaaggtgggccatgatgggaaccttttcctgggtggagggcagacccccgagagcagcggggtctgacagggcattgttttggaggcctgcaagtctggagcaggtgcaatactgcacgctcaggcaggcgagctctgcaaggacctttggccagacccgagcagagctaagctggaatagggtggggtactgagcaggcaggcggggaagtgggtgggcgtgcaggtgcctgggacccccctcagctcacagagatactcgccctgtgagagcaggagtcacctcagacctcctctccttctgttatctgctagtgtgtaataaatatccacaattcagcggcttagaataacacacagttatgatctcacagtttctgtggtcaggagtctgggcacattggccaagcgcagtggctcatgctggtaatcccagcactttgggaggctgaggcaggtgagtggcatgaacccaggagttcgagaccagcctgggcaacacggcaaaaccctgtctgtacaaaaaaatacaaaaattagctgggtgtggtggcacctgccctgtagtgccagctacttgggaggccgaggtgggagaatcacttgaacctgggaggcagaggttacaatgagctgtgatcacgccactgcactccagcctgggcgacagagggagaccctgtctccaaaaaaaaaaaaagagcctggactcagcctctctgggtcctgtgctcaggtctcacaaggctgcaaccaaggtgtcggccagtctggggtctttctggagttcaggcccctcttctgagccacgtgtttgttggaagaattcagttccttgtggttgtaggactgtggtcactgttcctgctggcgtcagtcagccaggggctgctctcagctcatcgaggccccctcccactgggcagcttgctttctcaaagccagcaaggacactgacttctagaccctcttttaaagggcttgcctgattagggcaggcccataggataatctgtcttttgagcaaggcagtcaactgacgaaggattttaattatttttttaatactttttgccatgtaatacagcctaattacagtggtgtcatccattatgtccatggtcccacgcactcagtgggagaggggtatgcagggcaggtacactagtggtgggagtcttggggaccaacccagaattccacgttcccacacagtgggagaggggtatgcagggcgtgtacaccagagtcttggggaccaacccagaatttggccgactgcagttgtctctccctctgttcccttctggtggcccttctttcccccaaccctttcctctttcttacatctcacccctctgctcctcttcttcttcttgcatggcctcccttctcttttcccggcccctcctctctgttcctctgccccccaacccccaagctggtgggctatggctgctatgaaacctcgtacctgctctgtactggcttagaaactgagccaatggcacagagccacctgccttaccaggaagggctgcacttggcgtggccttggtcactttgctggcccattggtagggccgtaggacgtcactctaatgcctttccttctctgtctcctccctctttgcttttgtgtagacccaagagtcctttcttttgtttgagacagggtctcactctgtcacccaggctggagtgcagtggcacaatcacagctcactacagcctcaacttcccaggctccagtgatcctcccacctcagcctcccaagtagctgggaccacaggtgtgtgctaccacacctggctagtttttgtattgttggtagacacagggttttaccatgttacccaggctggtctcgaactcttgacctcaagagatcctacctgccaccgccttccaaagtgctgggattccaggcctgagccaccatgcctagcctggccccaagaggcccttcacaccatgtaatatggtcttggaaattgaaaatggcaacaaggtatcaaaatcctgatgcagttgtgatttttgacaccccttgatttgaaagacatggggtgggttgataaaggagccaagcgaatagaacaaattcctcatgaggacacaaccaggcaacctcaagacgacagatcaagtgtggccagtttgcaacttagattaaaactgagaaagaaggtacatttgtaatatagtgtaagtctaggatgggagagagggacgtccctgtcaggaccacccccatgccaggagcttgctggccacctcggaagtcccattttaatattatctaggagccggttgtggtggtgcaaacctgtagtcccagctactcaggaggctgaggcaggagggttgctagagctcaggagttcctggctgcagtgagctgtgatcacacctgtgaatacacacacacactgcacttcagcctgggcaacagaacaagacctcatccccaaaggaaaaagaaaaaaaaaaaaaaggaagaaaaaaaggaaaagattatgtaagacgtctgaaaactgtttatagaaccattgttggaaggattacagacgtattctcaaaaaacacttcagtagaaagagggtggggtttgtttgataccagaaaacctgcactcagtaacacttatgccatcgagcttacggggctgtggtatcacatgaagcagtgaatacgcatgcagtttttaaaatgacttgtaagttgtttgtagaaacagttcagatgccaggctcgatagcatcatgtccattcctgctcaagcatttgaaacgttctcacggagcagaatgtggcagaacagctacaagctgaaaaatacttatatggaggctgatttttttagtgcaaggaaggactccaacagctagaaccgttctgctatgatcttcattgtgttgggaaaaggtggactcccagcacggctgtgttttaaggggaagctgagggtgcgtgtgtgctgagaagtgactggacagcagttcgctgggattacagtcccagctccacgccagccagccctatggcctcagatgggtctggcagcctctccaggccttcactttctgctctgtaaagcgaggggttgaactggaaacctggagtagcatccagctgttaacactctgctccatgcatctgtcagagctccagaaggaggctgactgcccagccctgccacctacaggctgtgtgaccttaggcaagttacttaccctctctgtgccttcgttccctcatatttaaactggggatggtaacagtctcggcctaatgaggctgttgcaaggaatacatggcatcatatccataaagctcttagaatattcctgcctagcatgtggtaaggacttgataaatggtagcagttcttataactatttctattgctcctgaccacccttttactctatgaatctggaatttattgctgtatatctgttaaactctgaacaagattttctttccgcatcatcactgctgaccctgtactgggaaggtgcccgctgctctgtcctctaataagatgccctgtccgtttcaggcggaagcccggctcgctgcaaaacgggcggcccgcgcggaggctcgcgagatccgcatgaaggagctggagcggcagcagaaggaggtaacgcttggggctccttgttgggtcttttcacagtgatttgcgtgctgggcccagggtgcaagtgcaggcacctgttgctgcagacgcacctggctgtctcacgttgctcacggtcagagtgcgtttgcgcctgtgacttctgcccaaggtcaggccaggagtgcgcatagcacggataccaggcgtgcctgctcagacctgctggctcctgagaggggcttagaagcctcttgcctgcgcagatcgtcgtttctagctgcgaggagccaaaatgttcagggtctgagctttaaggtctaactgttgtactagaatctagatcctctggattaaagtggaaaagaagaacggattaatgagtttttaaactggccaaattgttttatttaaaaatatgtcccccgtggtttgtacagtgttgatcacacacgggctccaggtttcaggatatctagagcccgtgtgtgatagagagacgggaatgaacacatggatgaaacagccaggaagaaattcctccctgggaaaatggctagcaatgtgttgacacacctgctcaagccatttgcaagttattttcatcatcttgagctggagctaggagtcatttctgacagcataagggttctttaactcacagttatggtgtgactttttctgtgacctcagagacatagaagctgagacccccactcagtccatgttctcccgtgggccatgccctgtggggccaagggaccatccacactgagcccacccccaagagcttttcttcttaagaagatgtgaatttattttgttagacagaagtaaccagctgccttccccagggttgattttaatacacaggttgttgtttggcttacatagccaaatttaaaaaggcgagccagtgtttaaaaccagtgagatttcggataaaaatctgaatttccagattctcttatggtggttgtagattccgccacattcccagcaaagaccaagctggccacataccctgcagggtcagggccctgccacaggtctaatgtgctcattgccctccgctgctaggagtttgccgctccatgtagaaacctgcatgcagaggctaggcagtgtcaccaagccctggaaccatcctgcacactcaagctctggtatccatagtggtgccagaggccactagaaggaatagtgcttttattctgaactggtttttaaatatgtatatgtataatttttttttttttttgagatcaagtcttgctctatcgcccaggctggagtacagtgacatgatctctactcactgcaacctccacctcccagattcaagcgattatcatgcctcagcctcccaagtagctgggattataggtgcgcaccaccatgcctggctaatttttgtatttttaatagagacggggtttcaccatgttggccagactggtctgaaactcctgatctcaagtgatcctcccgccttgacctcctggcctcccaaagtgctaggattacaggcatcagccaccacacctggcttaaatatatgtattttaaatgacaaaatctcaggtgctttttcacactgcccagtatcagtgtctctgtagaatgtgtctgttcatacagacacatttagataaaaacgtattgattgtatccttttttttttctttttttgagacagaatcttgctttgtcgcccaggctggagtgcagtggcatgatcttggctcactgcaacctccctctcctgggttcaagcgattctcctgcctcagcctcctgagtagctgggactacaggtacccgccaccatgcccggctaatttttttgtcatttttagtagagatggggtttcaccgtgttagccaggatggtctccaactcctgacctcgggtgattcccccgtttcagcctcccaaagtgttgggactacaggtgttagccatcacaccggccccatattagaattgatttaaatatatacatattgatataagatataaccaattagaattgatttaaacatatacatattgatataagcagcttgttacaaagttgttgggcaaaagttcttgatttaaaaataactaagatgaattaaggcaagcagtcatcgatttgaatggccccctttaaaagcaaagcatccctttattcctttgattgaaaggaagcccttttctgttgcattttaattgtgcagtttaagaaccatctgttgctggactcccacgtctctgttgtaatattcccagccacacgaaaagaaaaataaaaaataagccaggcgtggtggcatgcacctgtagtcccagctactcaggacactgaggcaggagcattgcttgagcccaggagcctgaagcaatgatcgggccatgattgtccctgtgtgtagccactgcactccagctggggcaacataatgagacccctatctctttcaaaaagtaaaaaaataaaaagtagttgctactccagatgggaaaccaagtcttgggcatttaattttagtatcatgaaaaaggggtgcagggcagccctcactgatgcttctgatgagcacaggccttgcggagaacatctgatgaaatcgggaagtctcacgtaaaacgccatggtttgccttcttcagcatgagtacagatgtcatttgcttagtagatggcattcacattttgaaattcttctccctacagcatggttttatcataaagatatttcaggggtcacaggggtcaagatatctcgccctgttgcaaattcggcggaacatccgccactgagagcggtggttttggtctgtgctctcaccagcagggaccggaggagggggtggtgtcccttgcaggcagcacctttggccaacgtcaccttttgcacggtcctctgtggatctgcagtctcggcttcctcatcaccgatgcctgcacttcttccctcacgaccgtggcttgcggctgtgacacagggcgggcgtcgtgggcgcggctgtggactcctgcctggggttggtcacggaccaggagccagagccacccaaatttaccaggttgtggaatgagagcctgggaaggtgggggacatgtcaggaggggcagagaaatgaacgtggccaagatggtgagtgaggacaccgagtgaagcagctctaccggggggtggggaagccactccttgtggcagcagaggatggacatggcagacaggaagctgccctgggagacgagagccagacgaggaagggccagcccagtcagcccagcgcagcacgcgttcctaacggcggcaacggtgccttcatgaatttcgggtctttgcaaggcggcagcattcctgtttaaagtttatgtctgcttcttcaaaagagggatcgaaagatcttaaataagatagatgtgtatttcgtgactagtcagagaagcctggggcggggggacatcccagagctcctgccgtgtggcagagctgggcttggtgctgtcacctaccactggtgacgggcatcttcccaaactttacaggtgaggaaaacaggccttagggagatacacagttttccccaaatccaagaaaatagccaagccaagattcaaatcagatttgaccagatacaaagcctgtggtcttcctagctcacccctctgtctcaaaatcagttctgtaccaacaataaaaacaagagtggaggagggagtgaatccgtgggccatggggttgaagttcacattgaggacgctggcacgcacagcaaagggggaaacagaatgatccacataatcctagtcactttccaagtggaagcatgccttgaaaaataaagttctccttggtgtggaatttgaggcacaggaatatgaaacataaaatatacaattttcttagaattttctataaatacagaatgagtagctttcacctagctgtgcttttatgtgacccaaagggtggggcagaggccaggaggaatgtactcgtgtgtgcgcacgcattcgtgtgtgtgcgtgtgcatgtgtgtgtgcatgtgtgtgcatgtgcgctcacacacgtgagcatctgtgtatgcatccagagggaagagtgagtcgagctagtggggtctgagcttgcacgtcttcgggccatgcctggaggatttgggaaggtgcactgacgacacctccctcacgctcttctttgcatatcacatctctgggcctggctattattagaaccagctaacataatttgaggttatacaatctggtagcttggggcactggcattttaagttgttgattaaggggaaatgaatacgttttggaagaccagtgtttaaagggtagggttgatactttggtgtaaaaattgagaaacctgatccctgttttcatcggggtcacaagccatcccacctgcatgcaggcgtttctgagcaggctcagggttttcttgagggggccgctctgagaacaccgagaagggcaggaagctgaccggggttggtatcccccaaggaaagcatggagcgtgtacggagaggggaggtggcgaggagacaccagtgtcgggggcagccctgtccccacagcattatcagactccaggccagctctagcccaccctgagctctctttcttgaatggttcttttcagcacacagacggcgagaacccactacagcttactctagctgcgttccggggtctgtttaaaaggatatgagctcttttttaatggatttgttaggggagaataatgtacatattcttgggaaattcaagtgaaccttgaacttcttagggagaacctacactgatagaagaaaatggtgatcatttctcttttcttgctgctgacttgataaacattttggttagagatgctttgtttcttacagtcatattgttggatgtagtcacatgtgttcccccatataagactagaaatgccaacttcttggtctcgcagttttggcagtgccttcaataatgcctgatatgacaaatgtcttaatgaatgaatgaatgaatgaatgaaaatgagtagctatctcagttttatctagtgattactacaaaattaaaagaaacctctgaagcaaacgaatatgtcaatgtatgataataacctcttttaggaatatttctgttatattctaatgatcactccatttagctggaattttcctgttattctgtgtgtgtctgtgtgaatcagaacatcaaagcctctttcttcattatttgtgaatttgaccagttaactttccaattaagtttctgtactttttgattaaacttttattaccgcaaaaagaaattctgaattaaagatgaaggaagtactttttctcattgatggcaataggttatacagacttctgtattagaataatagcagtatttttggtaagattcgtgtggctatgcccctatttccccaatgtatctaaaatgaaatgtaaagtaagtgataaaattacaaactcttgtcagtgggacctcacctgttttcttattcacattttactgtattcgttgtgacttgattcatatgtctagttacttacagaacctttcattctgatgttactgcttctttaattggattttacatttcttttttcttctgtccttctctatagatctatcaggtccaaaaggtaggctcttctttctttattttctaacttgcatgtactgttttttccttgccaagggcctggtcacctttcagaaataacaccttgcactgaagatacatagaagttcttactgtttattttactactttgtgtatgaatttgtttgaacaagaatgcctagatcctcatcttgccccactcaaagcaacagtcagacacatttctgtgtactgaatgcttttgtcatctgcattttcctcaagaaatgtaaaaattgtttctttgagaagaaaagtaattctaaggcaaaattatatttcagaatgtggatagccttctgaaattatgtatggaaagaaaaagatgattttattagaaaacttaaaaaattccatacaaattaccacacattgagagattattagatattgagttaaaaatctgagtaaaaggacagtgatgatataaaatgaacctgccattcatccctaatgctcagagatcataaaatgacgtgcctctctgtttcctagtattttgtagaagcagctgaggtttagaagtaaatacactgggcaggccagatacagaaaataaagacaagcaagtcagtgattcaagatctagcaaaaatgaagtcagaagtgagcgagttccttgagaatttatagaatttgtatacacgggagtctttcccataaatgaatttagtttgatacttaaaacatctgtgatagtttccttttataaatttagtttctagacaacaactgtatttttctcttagagcagatgagaaaatcagaataagatcacttaatttcggaggttagagcacacaggcctcggaatgcacgggcagtaaatttaagagcctgttgtgttggattcctgtgctggccatgatgacgaatcgccttccctgctggagccctgcactctgcatagctgctgtcccgaagagtgcaaagaaatttgttaagtagatgccagaatctcttgtgcttgactagtgtttccagggcccaagtgtagaaatggatattgcagctggagttcctggtcgtcctcagagagcctcgggaagaactggacaggtgcaaggccaggcggggagccctccctgtaactgacagcaggacgctctcatccaaaacctggaagaggggctctatctggtcgtttccacttgcattcatgcctttcttgtgctaggtcacattattttctttttactaacgtgccagggatacattgtgagaactttgtcagaatgtgaatttgtgtagaatgtgaagctagaaggagccccggaaacctgcagtggaggagcagaggcacagttttgtagtaaaggtgtgcccagggaagggaaggctttcctcattgctgagatgtctggggaggagaggaggcggcgattgcgcctccggcccagccagctgctttgcggaacagtttctctggaatcaaagctatttctgaaagtagcgcggctcctgcttccctccgcatggcttccggatcatggtagtgattgacgtttgaaatgtttgcccttcctggactttgctgtgctagtgctgctggctaacccaggaactactagttaattgcacttgctgttactaggggcgttctctccccaggaatgacatggaaatgcagttacagtagccacttataagaccacccatgaacgaggtgaaagattttcagaactggtcctttgtcatgaaaagagcaagttagagtgtgcagatataatgggcaaaaagaaatctatgaaaacagaaaaactgacagtacagattcttttggaatttaaataattttattgtgaatttatatagcccccatccttctaaaaacatattttgcttccctctttctagttaagccaaaaaataagggaggagtgatggcatcatattttacttgtgaaaaatctggaacttggcaggtgctaacattaattgaatgcaaaatagctttaagctgatgcatttccctgacattgaagttaaaacatgactttgggatgtttgtttttatttcctttctgaatttatattccaagggaataacctacagaaaaagatatggctcatgtcctttttgtcttttttgtcctttttgtactcatgtcctttttgtattattgaatttttaaaagtattgttaaattctccctcctaatttctgctcttccaattttctacttactgtcacctctaagagaaagagataagaccgtctgaaaactgcttatttttaaatctggccgcccttcgaaatgaaacaaaaccaaacatagcaacagcatgtttttggttattgtaaaacaatttcaaaaatggtcttgtatttctagcacctgattttttctcttgattataagattttaatgtatgaagagaaaactcacatctgtgttataatgatacggaagtttgcttagttgtttcttgattttcttactggaaattaaataaaaaggagagaagcaaaaccccattatttgggcccatgacctggcttcccacctacctttgggattccctgattgagtggcagcagtagccgttctgaatctgcttttctcattttaacttggaccactgaacaggataaaaacatggaagtataagctaaagcaagcttgtccaacctgcgggccacatgcagcccagaatggctatgaatgcagctgaacacaaatcgtaaactcttttaaaacattatgaaattttttttgcaattttttttttttagcttatcagctatcgttagtgtagtttatgtgtggcccaagacacttcttccagtgtggtccaaggaagccaaaagattggacacccctgagctaatgtcacctccagacatacataacttgtgggtctgcatatttttcttctgtacaaagacctcttctgtaggtggcagtcatctctccatccctgctacaaagacagcaaagtctatgaattctcacaggcctagactcagcatagacatcaggcagctagaacaagcgtcagcacgcagtttctccccttctcctctcagtttccctgaggtcccaacaccggaatggctctgagcttctgcttctcttcgatggtgttttattccttcatcgcgtttgctttgaaggcatgagcagcctgttggagggggcgtgaaggctgctgggccggctttactgtcctgctctcccccgaggcccttcacctggggaagcttcgtcctgggctctcttgctttgccgggatggggtgggctgggaggatctctcttcacagctcacagcctgcatgactgcacgggtggcggtccctgtggagaagccaggcctggtgccgactgctttgccttggcgtgttaccttcaccacacggctggatggcggtttggaaatgcatgtcagaacagtgccttagacaactgcctttttaagaaatttcacttcttgcctaattttctttcccttctgtctatagaaatattatgggctggatacaaaatggggtgacatcgagcagtggatggtaggccttgaatataattttgtttttactcttccctccccacttgaatacagtgttgagacttaaatggtttataatgtaattcttacgcagtttaactatgtagatagattcctattgcaccataatttaatactgagagattttcttccggggatttctgcatctggtctctgtttacatccccaaacgcagcctgcttagaaacagtcctggtcttgcctgtttggtagccactgactgctgatgtctcctggccagcagtttggggaggtctccactaccacagccgccctgatctcctcgagcacagggctctccaccaggactcgggctgggcatgcgcccctggcttgagaactttccagagaacattcccattggcttcgcagctcaccaggctgtggttggaacctgagaggtacattatgctccatttccttcactcatgattacgaccagctgccccatcgccctcatttagactttatctgcatttgctgttgggttctctcttcatcttgtccgctgtgcctgccgaaaccactggtctttggtaagaaaactcctttaccttctccacctgcttcctagaacagcccctctgccttcctgtggatggagagctagcctgcccctgatgatactcctgtccttctggctttctcaggaagcagcggcacccacatagggaggctgcggaaggggcacaatctgtgtgctttccactggtcccgagagagagtggcctggcccttctcgttagttcctctacccgagtccttctacctcttcctgtcccttttgctttattgcctggcctcgtggacttcatcacatgcttttagcatttgagaacctggccaggatggaaatgtcctattaaatgttccttatacataaaatgatctgaggaaaatccaaaattatttcctaacatcttacgtactgggtataaaagaggttcgctcttcagatatacagagcacacacttactgtattgaaaatatgattacattcagcctaggcaaaccatcattttaggcttacatgacataaatgtatttttgttaaatcttaagacatttctgtccacaggcatggtgatataagaaagagaaaaaaagaaaagaaatatttaaaaaatctttacacattctttgaagttgtatcattgttttatataccactgagaaagaaaaaatgctaattataactgagcaacttggattataagatacatccccagcttcagagatgtccaagtgtgaaaaaccgtgtgtgtcttagaatccacaatacatagtagaaagagtgacatccttttcggatattgtgtggaaatgatttatcttctgattcccgaagagagtgaggttctgaaagtaaggggaaaagtagattgatttaaatggatcagatgatagaggttagaaaaaaattaagacccagcttctgccccaaacactgtttttacaacaaaaatgaagtatgcaaattatttttgtgcttaagaacctcccaccccagaaaaaaacatttttacccactggtttaattaaagcctttaaatgaaggcaaagaaaatatttatgtgacatttagatcagaactgctgtattatggtgcagtgggactacctaagcttttttaaagcacttttcctgtgtccatctgtctctaaccttttcatgctgtttcttcattgttaggaagacagtgagcgctactctcgtagatccagaagaaacacatcggttagtaccgtgttcattcattacttgggcaatttgattgaattctaatttatgcttgcagtggctgaagtatatataatatattcaatctcttaatgatgatatcatctcttaaagaaattaactaatactattaatgatagaatactgatattattacctaaataaagactatgaacttagcttttagcattttgacctaaatttgataaggagagtgtgtttgagaaatttttcagtattaatatattcatgacagctgtagtgctttttgtgccattgaatacccataaataatctgcatagtaatatacaccaatgctgtgtatttatattacccgtgagataaagaatactacttggatgaaattactttttttttttttttttttttttttgagacagagtctcgctttgtcacccaggctagaatgcagtggtgcggttttggctcactgcaacctccacctcccaggttcaacaattctcgtgtctcagcctcccaagtagctgggactacaggcgcctgccgccacacctgactaatttttgtatttttggtagagacggagtttccctatgttgcccaatccggtctcgaactcctgggctcaagtgatctgcccacctcggcctcccaaagtgctgggattacaggcatgagccaccgtgcctggccctgaaattactttttttttgagatggtgtcttgctctattgcccaggctggagtgtagtggtgcagtcttggctcactgcaatgtctgcctcgtgggtccaagtgattctcatgcctcagcctcctgagtacctgggattacaggcacgtgccatgacacccggctaatttttgtattttttgtagagacagagtgtttcgccttgttggccaggctggtctcaaactcctgacctcaagtgatctgcctgcctcggcctcccaaaatgctgggattacaggcatgacaccacacctggccctgaaattactttaaatccatattgcccataagcagacagagatccacaaagcccatgctgtggaggacctagactggtgtcccctgagatgtccaggggtggctggccccctcactgctgtgggttggggtcagttcccagcatccccctgaaacttgggcactggttcttcatgtatgttgtatgattccttcacggttgttctcgtcctttcttttaataggcttctgatgaagacgagcgcatgtcagtgggtagtcgtggaagcctgagggtcagtaaccagaatgatggagtttgcatggcacagtttctggtccaagccctttactttctcatccccgcattctgatttcttcttcattatccccgtggtctgatagtcaatatttaaccgatgagatgcttacttaaaatcaaatcaatgggggatgtttctttgttgctgtagagagatgatttatatgcataggcacgttggttgtttctttctcccgagatgaagtcatctttttttcaatacttatccacatcacaaagctcccaagccttgattagcacagttgtctcagcacattggtgttccacaggaatgcaaaggcgcgtctgccctttagtaagtctgtatccactgacacccatgctcctggtaaaatcggaacctctattaaagtagctgtaagttaattattattgagcaatgttttggcatagccactatagactgcctgctgaaaacctggaccaggactggatccgtaaggtctgccttcagccgcttttccttgtatcagttataattagatctctttaccactgataggcttaatggttaatcaacacaaatatggacttttccttaaacattccagaaaccttaataattatacttgaaaaaagtgtgagtttggggggaagtaaaatagaaaaactatgttttgctcagtgctttaaatcagtgaattaacctgagcatgtcagtttcttttactgcaggattgaaattacatctcaccgctagtaataaataaatctcaaagcagccactcgctttattaatccttagggaccacatagagctgaaggcttgtttctcttcactgtggcaattaaatcctattactccttgacttcttatacatgcactgagtgtgcatgtaatttggcccttcccaatgataaaatgcagaggtgaaacacggttgctgtgctgtgaagccactctgtccttgtcagtgtccttgcagtgccaaaagcagatccgtagtgattttgccaaaaaactgtggttcaaatgtgaggccccgtgagggcttccttgctgtttgaaaccttctcctgagatgtagcctcagggatgctgttgtaaccgttacctcgggaccgtctgaccccactcaccccagaagagggaagatttatggatccaaaatagaataaatgcaaagctcaattgacaaagtctgtagacaaggcccagacatcacagctgttgagcaggcccaggagaagcttgagtccttgaaaccagtgaagaaaatgctgtttcagggatgagggggagcgaccgagagaggaggaaactcagacttagcggtatagaggatgtcagtcactttggcaggagaacttttaacggaaatattgagggcaaaacctggttaatatgggttcaagagagaataggaggagagaggcacagaatcccaaactgtctctctcaaaatgcatcattttcagagccacaccctcctgaaattgtaggcacaatttcagatgtaagatgtgtgcacttacattttcctgggaaaagaatgttcagtttcttcagattctcagagggtctcctgaccctgaagagttgaaaaccattgcaatatgaacgagtattacggtgttatgtaacagcattcatttcattttcaatgatttttaaccagaaataagttgcatctttctgctggacaccactctttgccgagatatcaagtatatttgttttaagagctgaaatttcctataggatgttcaccattaggacagtacataagatggggaggaagtggatgggattttcattttcagccacatgacactttcccatcaggtacttgatctgaagaaatatattcctcagaacttaagaacttggatcctggagatgagagtcaaacctcctaatgtttataggcaccaaacaagcccagagtggtgaagaggcctgcgtggggtcacagttcttaggaacaaggccagtgcctgctgctcagggccctggtgggctgtgtgtcctccgtgcgctgggttccctgggctctatgcttgcccctttgtaccaccgaacagggcactccccagagtgaggactggcatctcgctctatttctatgcggggccagtttctactgtttttatgtattttaatattatgaactttttacatttttgattgtaagatcgtatcttttatttattgactctgaaaacacaggccttcttcatttagctagaaaaaatgataaaccctaaaaaaggtggggaggtgatttatactactctggaatttgtatggatgcctcctcagaaagtctagattttggattttctagaatttctcgagtttagattttctggaaaatctagatttttaattttcctttttgaaaattgatgacagtgcatctgttaacctttgcccttttgtaactaaaatggattatgtagaagaggaaataagatttatcaaactgtttcagactttgtgaattatagcagcctttgccatggaagtttattgaatgctactggattctgtggtagctaccattctgacataattctttttgtaaatacatattagatcctagaaattatggaaaaatgcatttttgttaagattttaaagattgcttgtatttatgttttacttagcttttaaatttacttttggcaactctctttgctgttgttttttttttctgccatctttcttctgacagtcgcagcctgacttggagtatgggggtccttacgcctgggtgagatggtcggatatactttgctgtgtgaccttaactgtgtggtgtgaccataataacctgtggtatttccacgaatctcatgggtgctttgtctccagtttttgcctggggggctatgaggccaggagggcaggcttaccctgcagagtgagcagtcttcctcctggggcctccagggtgcagccctgatcctgccggaggggaggagcccaggcatctgtgcatgaacactccctcaccagatggcctttgagcaccagctgtttgccacgccttgtgttagcagctgtgcataccaagatgaaaaagatagtgtctgccttcaaggaactcaaatcagatcaagaattcccaaggcctctacatttgctttaaaagattaaatgtaaagccattttacctaatgaaaaatccattattttccagtctatatccattcaaattaaatgtacaatctgacttttttttttttttttgccagaaagtattctttgagaaaactcctaacttccagtaacaaaaactaaggctttagacataaactcagaattacttcttatatgtctctgacagtttctgtgccttatgctttctaaaagtctgtcagtgttatacttcaaggaagaaaaagttctcagaaagcacagctcagcattaaagtgattcgatactgaagttattgtagcatattatgtactatttcacctgaaggactttacctaaaagcagtttgtgcttcatttgctccagtgcatttcaaaattatttagtaaattcttgttttaaaaatgtatttttgtgtttgcaattatagtgaatcaatagtagcatacatctgcatagcatatttggtgccctgagcctcctgtgggacggctgttctgctcttaacagatacaagagcagaggctggagtgagtagctcgggagtcaggacaggggaaagcacaaagacagggcgttagattcagaaagcgctcttcacagagtatctgttacttacctacagagcactgcaagtcgctctggcaggtgagggcatttctgtgacactgtaactccagcaactctcctgttctttaaggaattcaatgtgttagcaacatatttctagattattactctttttatgttaaattcaaagtaaattttgtttaagagctagcccccagtgggataaatgtatatgttagcaatggtcaggaacacattttggattttttttttcggtcttaattcttttttaaaattcaatagaatgcatcagggatcgaactccagagttttgacgtcaccttccttgtttccttttccatctctaatgccctttacatgtgctctgtcttttgactcatgtagaaaagacatctaacattattcatccaaaaagttggcagtggacttttgcgtggtcccatgggaaggtcacagacgctttgataacactgcgtggtagccattagcattcggactagtcacaagttaccgttttcatagggcatttacccttgtatcttatttatcctgtattagaacatactaacttatgtgtgtcctctttattttattctctcttatggcagtgtttctggagagcttgttagagtgcctgttcctgagccctttctgtaggtatcctgattccctaggcagtggcccatgcttgtgggaagcatgccaggtgtccaggaagcaggtgtgagacccagcctgggagcatggaaccagcaaagtgaacaagcctgtgtaccacttaaagctacacagtacaatagagcgaagcttgttgaacatcagagacccaacttaagatgaagttaatatgctgcctatggacttttgttctaatattgttcagttaactgtcaatgccccttgccctcttatgccacgtaaaaacagccccacccatctaaatacaacacaaaaaaacaccatccaagaggagaaagttagcagtgttctttaagaaggtcaaagtacttctccctatggaggtatagtcaacaagatcctatagatttgggaatacattctaggaacatagcccaggaataggttccttatgatagaattccattaccacagacctggtcatggaaattgctttgcaggctttcctgcaaagtaacagtttttcccaggttttcgtagaaggctgtaagtggaaaggtgacaaatgagaggatactgtcatgcttccagcttgcccagccttctgctccgtcgctgcaggctgagctggagaactacagtgcaaaggacagggttccgccacagagctatgtatttcataagcagcagtggagagccagaggccttgcttatgtcatacatttctcttcctcatttgttagtaaagtcaaagtcatctaaaagtgattaacattagccttcattattttattaatttcttctggaatctagtttctgaagacataacaagggattgagatctaaaatttgcaagtccttgacatgcattttcatgtcaaataatcttgttgctgaagacatgaaaggaaattagtctgagtaaaactcttgccaatctccaaagatttttactattaaatttatttcagaaatgttttaatgttactcatagagttctcaaatttaatatggaaggatttctacactccttttgtttcagaacttcaaattgatttcttgatttgttttgagttacagcaaagataaatatatagtttgatagtcaaagttttatgaatctggatttataatctgtctggaaattcaatttttttttctactttaatgtcatggctgcaaaatatgtgctatacagcacccgtcccccggataaggaaccatgtttagcacctcccatatgccaggccccttccatgtggattcatgtatccacccagtcagctggtgattcatgagggcactgttctaggtgcttgagatactcattttcatctcatttaatcctcacgatggctttgtaatgtatttattattatgcacattttcacggctgagaaaacagatgttcaagtgcattaaataattacttaaggtcacatgacggagcttctttgtggaatttggactcatgcccaggacctgatggcgtctccttccatttttaccagttgtgtagactgctcctcctttttctgtcccgagagctggttttgtctctgatgcttgacagctctattttgaatcagcagaaatttccttatagatgaattaagggacatttagaaagcccatgctttgacttaagggaacctgggctgggaactgagaagagagggatgataggcatgcacttagtagaatcattctcctttattctggaggacacattatgaaattattaaatatgtgttcaaatttcattttgaaaaataaagtaggagggctggatgaataaaaaactagtatagaggatataccccacgatgaacttttgcgtttaactatagattgactagaaataatttctgaggccgggcgcgatggctcacgcctgtaatcccagcactttgggaggccaaggcgggcggatcacgaggtcaggagttcgagaccagcctgaccaacatgatgaaaccccgtctctactaaaaatgcaaaaattagccgggcgtggtgacgcacgcctgtaatcccagctactcaggaggctgaggcaggagaatcacttgaaccagggaggcagaggttgcagtgagctgagctcacactactgcattctagcctgggcgacagagcgagactctgtctcaaaaaaaaaaaaaaaaaagaaatgatctctgaatcttctgaattatggcccatagcatcacaatgtgccataattttcaaagaccctgaaccaggaactgaaaactcattgactcaggctgaatcactacccatcggcctggcatgtggcttcttgcaagcagaatgtccacagagccaccataaaaccagaaacagcctgacaaggaaatggccacaccaagcccaaatgttccaccccgtggagggacttggtgccactttaaaactaagagtggcatgtgacatgaagcctactgacttggttagcttgactgctgttccctcctgagctgcgggggagcagacggcggcagggatgcagtttgggagctgccaggacttgtactgtcctggactggtcattcatccgctccacaagaaaggtcaccttatacctggctggttggtccctgctgatttgtacctgtgaattcatttgtgtactgatgtcagtttttctcttttcttcattgaaacagacaaatggttatgatggagaattgtatggatcacagtccctgaatagaagatctggcagggttagtatagtaaatttgcatggctcaaaattcaaataggttgtttcaaagcttctagaactaaaaactaattgctaaatttaaatttagcttctttgctgtttttaaattttaaaatcggtctgtcttttttttcctagcacatgatggaatgaaagataatgtttttcaactagcaaacattctgagaatgttagccctccaacattctgattgttagtataaggggtagatattgataagaatctcaagttttaaaagatctgaaattaaagattaactctttcattactgtattcccctgggtgtatgtatataatgtgtgtattaagtatattcagctttcaaagatactaaatccaacattttcgcagtctccacatctgtcatttgtaattttaatgtttaccttaaaggcatgtgtacaagcacctgtgtttttctggagaggaaaaggagaataaaacaatgcagatgcttggaaggctcccagttaaggggtgggaggcaggaaggagctggtggaaggaaagggtgctgctctagggggagagagagggagtggtgccagtggcaggggcattagggagaccgggcgggggtggggagggctttggattaatcaaggacaggaggtcattggggattttagaaggttacactggatacatttccattaagcttcacgatatcccacaggtccattctgtgtgaaatggtctaaaaatttcctgttctcatgcttcatttttttcttttagtaatattcctaattgtgtaaaatagtatttcttttcatttatcttaattatgttatattaagatatcatgtgtatgcttaaattatacttttgggcttcaaatgagtgaccccacccagaccttcttccctctccccgaccaaagccgtctttagctttctgaaaccagctgatcaagttgtttttacttgctcattcctatttacctatttagcattgcatgcactttaattatttattttttgagacaaagtctcgtgccctcacccaggctggagtgcagtggtgctatctcagctcactgcaacctctgcctcctgggttcgagcgattctcctgcctcagcctcccaagtagcttggattacaggcatccactaccacacctggctaattttttttgtattttttagtagagatggagtttcaccctgctggccaggctggtctcgaactcctgacctcaggtgatctgcgcacctcggcctcccaaaatgctgggattacaggcatgagccatggcacccggctggatgcgacattttaaaaatgtatactcaagacacgtaaagatggccttcagggcatttgcactctgtggataagggctctccagtggacgggtggcagcaggctgtcacactccacccacctttctggcaccccagggctgagctatagcccgcaggcgggctgggctgaagaaagattgaaaattttgcaataaatggaattttagttacccaaggagataagacaaggagtttactgacaacgcagtgtgaaactcagtaattacgaatcgtgctagggatatgagattgtgaaaagcagtactagatacacccctggcatcaccaagacacaaacactgaaggtgaaaatacagcttagaatctccagttgttaagaatctctgctgtactgtttgtgcctcgcgtctttagataaactagcgttcctgggctcctagtgttggctcggttgtgctgttccatgttcgccttttgaatgggatgggggtgcttttggagtcgtaaggaagtgcttgtcacttaaacgtgttttcttctttggtgctcagaattccagctacagcggtgacagcagattctctactttgtcatcatccagggaggagaagttggttggtttccatttaaatctttcacattctcttcagaaaccgcagattttgtagcatgcaatcttgtgtgtgtggattcagctctacttttctctttcggtgtctgtttgacggatttttgtttgggtagctgtgttattgacgtgaaaagcagcagttaacatgagctccttcattcagatgtactccagtgtgctgcgtttgaccacaccagctcgaatgtgaattgtggcattcagctggctgcaatgaaaggacgtgtttttgtgtatattttctaattagaattaatcaaaaggaaaaaaataattagaagaatgctcttgaattcttgagagtttctgaaaacagaactactttgaagagtacatgcaaactttgtggtggtttcttgggcatggactagacttggaaggaaaatccagagtctcatccaaatccacatgtttacacaacagagttccttcccattctctacaaacatgcatcggtcttgataaacataatttctaaattgtttaagagccctaaaattgctaaggcttgttggtgtttgtttaggttcacatttactcagcaaaattgggactagtttaggtaggaaaatcaagcaggccctgggatcacaaagctaagcagaggaggtgggtgctctccaggcactgacatctagaacagaagccaccggcaccggagaccagtacaggagtgaacagatgagtagatagaatgggagggagacactggttttgccaggaaaaaagatgtgagctgaaccttaataaataggaagggccaggtgtggtggctcacacctataaatcccagcacttcgggaggccgaggtgggcagaccatgaggtcaggagatagagaccatcctggctaacacgatgaaaccccgtctctactaaaaatataaaaaattagctaggtgcggtggcacatgcctgtagtcccagctactcggggggctgaggcaggagaatcgcttgaacccaggaagcagaggttgcagtgagccaagattgcaccactgcactccagcctgggcgacagagtgagattccatctcagacaaacaaacaaacaaacaaacaaacaaatagaacaaatgaaaagaataggaactaaccaggtagagcctagaggggaagctcttcaaggtaagtagccatttgagcagagcagaggccgcgcagaatgggcagaacccaggagaggtgccatgtggctgagcacagggtgctgttggagctgttccgtgaacctggtgactccagtagcagctcccacgctgaaatcagaaaatgaaatctatgcaattcctctgcgatttcctttagccactcccatgtatcattgacctcattaaaatgcttctagaagaaatagctctgacccttccccgccctgtccccaatttccagcccctattctcgtttccctcccggggggttggggggtatctttttcttgccagggcacttcttcctcacctcttcaccccttgtccaaccccttcatgtccagggagactgcagaaggtgctggcagctccatggcgcccactgcttgccacctttctcaacccttcccatagtcccccagtctgtaataaatccccccactgtaagctgatggcccttctgtcccccaatatgtgaattttgactcagtatatgatcagctgtgaacaccaaagcatcggtgggtttaacaccttgaaaaaggctttgggcattttcttaattcaagagattttgctgttgcagagggcacttagtcattaagaaaacttcatttccaactcattttcgataagctgagttacttgctctaaaataaaagatggcaataaatatctcatctttggatatgaacgattcacccaagttcagcctgcatctgactcacttcagtccatttaagagaaataacccacatccaaagggttaaacatcagaatgagagctgactcattcaaacagggccacatgtgaactcgccctgagccctgtgtgcccgtgatttgctgcccgagggctcttgtactcacccaccctcagaaccttcctggaaattgtgctctgtagacatctattgctgcccagtacgtggtgcgtttaattttatttaaatataataatggaaaggtatcagtgtagaatgtagtattgatgactcttcctaatatcaattaaaatttatttcaatatttaatatcaactaaaattaaatatttttttctgtgcgtgaactcaaaagtcctaatttggccccatctcctagttttgtcagttgcctggcccagccgtctttatttccttctgaccctcgttctctccctcccccgtgagtgcatgcctgttactgttttggttgtataaggtaatcgtctctgaactcactggactgatgtacctttgcgatgccgtgagggtgtgagcctctctctcctctctgctgcccatttgctctgattacagggactctccggctccagccttgggcttgccggtggtggcctggctcccacacccctgtctgccccaaatggaagctgggtctgtctccttttcacatcactttgtcgctccttccctttccttctgtgcatcactttaattgctgattacatttagtggatagttcagcctcctctacacaaagtcacaagagcaaagcttagcaactgttttaattggcttgactagtttgctaagacttttgtcaatcttttagaaaaaccatgtcaaataagttagaacctatatagaaaaggagacttaaggaaaaggagggttttattaaatgcatattttcaaaaactcgagtccaaaaaattggtctcttgggtctctcctccttttccagcaattgttccccatttggggtttcatttgtttttttaaaaatattttttctcttgtaaatgtgtccaggaagcaatttggaaggtttttgtgcctaatctgcctccttggtccctgagaagtggacagaacagtgttattcctttggctgggtctccccgctgtttcctgtttttacaaggtcaggttcaggtccggccctgaggtgcttggcctgttagctataggtatcgagtcttattctaatccaaggaagtcggtgtcagaggtgaaagtacacgtcctatttggaggttgaactgtccctctcccttgcatgtcgactggagctgctgagtgatcaccgcctggccgtgcaccttgcctgacttgctcagtgtgccctggaaatgagtccagattctgtcccgtggcacagtctctggacactgggagctgcccttgtgtcccagcctgtcccttcaccagcactgcctccccctgacgtgtgtgctaggcaggattctcctttgacagggctagaccgcggctcctctgggggtgcctcccacaccagctgaggcagccttgcagtgactccctttgtgtcttgaagactgtcgctgggcccctggcatagaaataaagactcttcctgctcctgtcttcatgtgtggacatctgcgtattgaatactgccaagtgtgtcgttaaccttggatttgagctgtgggttttgttgctgttgttgtgttgaccttgtcaccattctgtctcatcccctgaccctttcttccaggaatgcctgaaatgactagaaatgatcgtgttttaaagatgctgggaagtttactgttttaaagttaaaaatcatctcagttatctttcttgtaaattttggatttgcatctatcaaatttgcagaaaacacggtgcctcgatcggtttgtttctgtttaaccactgtacagcagttggctatggtgaatgctgaaactatcgtgatggccttttgctgtcatttgttgctgttttttcaaggcttttaaaacctgccatttgctttcatcctccagccctcctgtctgtacagcgctgcccggccttcggggagttaccgggtgcgtgtgctgcccaccctgctgccccgcaccccctcccactgtgcatgcaccgcccccaccaagcccagagccggggatgtgcctgttcccagccccctgggggaagttgcaccttcacgtggagcttacatgtgccagtggggaatgtctgtcccctttggccagatctgggttttctctcccccgattgttgactgtagctgccacactgctctgtctccaggaagccttgtgtttgctgggatcgttaggcaggaatggaacaacagcaatgtttactttacctattggcagaaagaatggtggctttttaatgctttggtaacctggacagatactaatccatgttactatattactttggaaatttccagttttaaatataagtacttatgctatgcaagaaacgtaaagtaaatactcaaagtagctatattgtcttgttaataaccttttttttttttttttttttttttggagacagaatctccctctgtcacccaggctggagtgcaagggcacgatctcggctcagtgcaacctacgcctcccaggttcaagtgagtctcctgcctcagcctcctgggtagctgggattacaggcacgtgtcaccacacccagttactttttgtgttttcagtagagacgggtttcaccacgttggccaggctggtctcaaactcccgacctcaggtgatctgcctgcctcggcctcccagagtgctaggattacaggcatgagccaccacacccagccattaataactttctgaatttccatcagattgcatacttatgtgtttgatatattaataaatggctgagcaaactagtatgtcctcaagggaaaatagggaaattaaagttcctttataccgggcaaagtttgacatcaccatttgtggcagtgtaagctcctgtttacccacgttgattaattaagtagcattttccagttaaccaattactctttcttctacttagcaacttttaaagggttataaaatatttaacattaaaactataattaacataatttgatattttatcccaaagtcacttcacataagagtaattttctaagcatcaagtatgagaatgccatgacaaaattcaggatgttcgaattatctgctcattttaacctggattaacaagttttcacttaggcctgggatgttttccaaagtaatagatttaaatggtctgttggagattacattgcacacctcctgacaacgactaaaaccggtctctcctcatttccttgtcgcactctgcaaccctttgaagagctggaaaggtggttctcagcctcccctgcatgctttttcaggtcatgctcctggcacgtgtcagtttttcacagctcacgttttcagcactttctgggcactcttggagaaaggaagagcgcccatcctgacagtctcttttggtcgcaggcgtctgtgttggatgaaggcagcttcggtgggacccgacggggcagcacctccggctcccgtgctgtaaggcgctttcggtgatacctcctttcccccgtgcctgctgcatggcctggggatgctcgctgggcagggtccagccgtggggggtgactggccattctcaggaggaagcgccgagtcaccgggctaaccgccaccttccattgtaatgaaggtcacaaataatgtgaatcaggaaacctctggttgttggtttcatgtcctcactcatcagggagagtaacttgcactgagtttcatctgctctctctgcagcacgccaaccatactaacaggtggtgaaaccgtcttcggttaataaaaacgggaaaaggacaacttgacagaccacacatcattctcgtccctggatagttgaggaagaggaacaaattttaaaacttggaatgttacgcatatttcattccctgtttgtattttgttgtctctctacctctttcttcaatttgaaatgataggctcagctatgagggtaaagatgtaataggtgcaccataaacatttgtgaatgaatgcgtgagaaaagcaacaaggtagaaaaatgagatggaacccgtggaagtggggagacgaatttgcgtgtcccagggacctgtggaaacggagcgttcagtgctaaccggtgctccctggcggtggatctcctgtattcagaggctcctccccaatcctataaaaatgtcttcaagccctccaggaaatagaaaggtttactaagaaatacttgaaatgcttttataattttgcttttgaagtttatcagctacttacttgactaaatccagttttatgacttactatgctatttgtccagccatcatggatattcatgaattcttatggtgtaagccagtctaacctacagttttctttaaaatgtaatttatgaatattaaatccagtagttgacatagcattcgtttttgtcgacaactgattacacatttatcaacttttatattacataagttgttcagtattttgcagcccactatataacatatttttcccagttggtaaacattttcataggccattagaaagctcataaaccatgcatgaagaatgaaatagccctgcctatgatgtgatggataaagcacaactaatgattttcttttgtcagaaaagagggagaatactaattcaagagaaatttcccccaagcaccaggtggttttctggtggcttcagtagagagtctaagatctggcaggacggagggctcctgatgctctccagatgctactgtgtcacgtctgagatgggcttcgggagtcgtcagccctagatccttggccttcattgctcttctgcgagcagtgatttctgtgcttttagcccccacaagaattgcctgggagtgatggccttagagagttaagaaaacaggaggtcatcttgtcctgacagcacagctgcctaaaatagggatggtcagctctgctgtgagcaggaaattagcaccatgaggaagacggaagggacaaagaagttcctgacctcccaacctctgccatcgtttccctggaaccctcacagttcccctccaagtggatactccgttccttatgtttacaggagggccttgggagagagccacccctgctctcggtccagcgtgtagggaggttatggcccaggacggtgtccagagcggccccggcgcccaggcctgaggtcccagccccaagtggtcgtgacctcagggtccaggcttcccccaggcctgcacagacagccctggtcctgctgtggaggatttgccctgcccctggaggaccaggaattgcccccgcgcagctcctgagtgtgaagtgactttcttcggtgttgtgacaaagctgggacgtagtcatcaccagtggcattgtctgatccaggagccgaggaagttgtttctggcagaaagtggaaataagaagcccaacatgtaccccctttcctagtcctcagctcctccatttggcccacgtccttacttccatgtcacagatgccgggctaaggaacttccacagccacgtggccaacaagagatggagccatgattcagacttaaagctttctgacttctgcacattagccacataactcctaaacataaggtgcacgtggaccgtggcgatatagactttcactttgttcttttctgcgtgattaggtccagttggaaggtttgagagctgcttttgcttagggaagctggggtgggcagtaagctctattcacaacagttcactgtgtctttgcaccataaaccagggcatgaatggcataggatggagaaggatttgctgcaggatgaagttttcctctctcttacatcaggaaaccctcaggcaaaattcttctgctttaaagtgttgacattaagtgttttccttattttcaacaagaatgccaaaaagtgaggctagtaatactggtgattttcttgtatatctcaaatgtggcattgatgctttacatgtgctgtgtacacagcagtattaatctgtgaatctgaaacaacgtcttgcccctgagtgtaagtgtatagtaaacatttatcaaataaaatagaggtggatgggtctggggaacttgcccatcttgtccacagccctgtacatttaatgctttcaattgacatttgatggttattttagtctacagttgaaatcattcgttcattcaacaagtatttcttgagtttgccaggcctcatctggtcactagccctggtgaggaaacaaactaagagatggtatttgacatgagatcatgagcacccctgaagatctatatgagatcacaagcacccctgaagatctggatgagatcatgagcacccctgaagatctggatgagatctggagcacccatgaagatctggatgagatcttgagcacccctgaagatctggatgagatcttgagcacccgtgaagatctggatgagatcatgagcacccctgaagatatgggcttccttataattcgcaagcagggcacttcggcaggtccccagcagagcctgtgaggccagcagagggttctgtgcccagcacagtgcagggtgtccaggggctggaatggaggggccttcagcagtggcgaggcttgctatatggtgctgcgtgggtctctcttgaagatgctcctcaggacatgtcgggatcctaaatagtgttcaaatcctgcccccgccccaccatgccttgctcaggaagaatatgagaatgtttataataacgtgaaaatgtatctaagactagcagatgtgaacataaatcaaagttacaagggcgtagcttccagataatcgagttgctggtattttcctttaccagaagtgagaaagttcaggtaaatggatagacagatgtgtacatagcaaccacccaggtagaaggtaatctggcaatttaaaaagccatacataattttgtattaaccctaactctcattttgcttccacttggaaagatagtggagaagcaaaatttttgttcccttgctaaagcgccaagcgccctgtgcaagtcttcagtttctgtgccggaaggcagcttaagttctcaaaacagtcatttccacatccacggggtgactttctgtgtctacactaggtgtgactgcacacccaattgaacgggtgctttgtgttattttcttcttcctaactctgagaaattctgtgttcctctgataatgtgattggcttttttattcttagcgagcactgatttgaatatgcgtttgctgtctaaccctaactctcttttccttgccgtgcgtggctaacctcaccacttactgcagcatgttttctgtcggcctctattctccttgctcctttgctgaccctgttcctttgtttctggctgcgtgtcctggcggtggctgtgtgggcagccctcggagtacagcggccacctcaactccagctcccgcgcctcctccagggccagctcggcccgggccagccctgtggtaagtcggcctcctggccttgctcctactcagtgtcaccctccctcccccttcccttatcctcctcttccaacgtctccaaatttagaatattactctgcggtgatattattaggattacattgctcaacttttcaaggaccgtaaaagaaattgttagctgtgcttagagatggggatcttagaggaggcaaactttatacaaagggagaaaataatatagccatgtgcacggatgtgtggttttctttttatgatttaaaaatttgaagtattgactgttaatgctttgcttgaagtgttacctgtgatcagaccccgacagtgtttaaggtaaagcgtggcctgtagatcccgggacgctcccagtttggccccaatcattcgttaccctcctggttctcagatccttcgaaatgtgcagatttgcagccctgcatcctgcttgtcactcagcgtggcccaagttttgtttcagaaaataggagccctattaggtcatccccagcttgttaagtctcattattgtgtgttttcccctgggttgttggaatttgacacagttttacctgatgtgatgcttgaaggcgaccctatgactctttttaaaggaagagtttgcaggacggttttggactggggcttgtgggaatggaggaggggaggtgggcacatggccggggaaacagctccaggctgcacgaccagaccagcgttcccaccctcaagagccagtgagaaaccttggggagaaaaagcaaagatgggcaaggcttccctgttcgtctccactcatatcaaaatttccagcctgagctgggtgtggtggctcacatctgtaatcccagcgtcatgggaggctgaggcaagaggatttcttgaagccaggagttggagatcagtttggccaacatagcaagaccccccatctctaaacagtaaaaaaaaaaaaaaaaattagccaggtgtggaggcacgcatctgtagtcgcagctactcaggaggttgaggtgggaggattgcttgagcccaggagttcgaggttgcaatgagctatgagtgccactgcatttcagcctggacaacagagtgagaccctgcctctagaaaacaaaaacaaaaacaaaaacttctcccagccatcgagaagttaaaatgtggctcttaagttagttactgaacaccatacttcagcgtgctgatccctacaatttctgtaacgttcctagtaatcaaccaagaagtcgcagcgctgagacctcctgcttgcgtggatgtaccttttttggcgggcttttcctattgtggtgctggtggtttgtttgtgttttaaattagatgcagtcttttaaaactgtgaggtttcctacctcgcacctgatacctgcattcaggtatcagcaaatgcaggtatcagcttctttgggggaagaaaacccaggatctctggccacttgactctgaggctgccttgcagaactgcacagcctccaccccacccactattttcgtgaccccgaggccacggcccaggtgccattcatcactgtgcagcatggctttcctgtgctagaggaatgtttatctcctccatccagccatggagagcaggaaaatagagttcaatatgggtgggcattgcaacgccagcgcctctttctctgggggaagactctcccctctgtataagttgcagacacccactcttgtcacacatttggctctgcccacctggcctcacaggcatttgagtttgtgttccacccctccccatcccagagcccagcagtcagcagtgagagaagccaaatgtgtgcagggagtgcgaggcggcagctaccatgcaaactccaggggcacaccgccccccagtaatctctccccagagtgcatcaggcaataacaggaagatactcagctgttcattatgacatgatttcccattttcaaacctgacaagttggtcttgatgctgttattcaaataactgaaagtaaatggttgtgaacaaggaatttcagatcacagactcagtaagcctggccagcccccaaggctgtgtcttccttaaagttgggatctctgtattatctcatactctatagtagagcaataaacataagctgacttatgtgatcacttaaaactaccaggaagaaacattttccgtaataaatttagtgtaggattgctttgtcttctcacactcacttttcagaaaagaaaatgtaagtattgccaggcgcggtggctcacacctgtaatcccagcactttgggaggctgaggcaggtggatcacttgaggtcaggagttggagaccagcctggccaacatggagaaatcccatctctactaaaaatacaaaaattagccgggtgtagtggcgcatgcctgtaatcccagctacttgggaggctgaggctgaagaatcacttgaatacaggaggtggaggttgcagtgagctgagatcgcaccactgcactccagcctgggcaacaaggcaaggctccgtctaaaaaaaaaagaaaaaagaaaaaaaagaaagaaaagaaaatataagtatttacaattgacagaagaatgttgtggctttactttcagtgaatcccaaacacgcttaatgccctctgtaccctctgcctggttccagtgagacatgacaattggattttgttaagcattgtctttattcaagcatatgatgaagtctcaaaataacagggctcaatatagtcacttagagattgaaatgacacaaatttctttgtcatacgaaattgaccgaagagactgaaatgatacaaattcctttgtcatgtgttttctaaatttgtataaaatttactcacaggtttattagatgatcataaacagaaagatgtgagttcagccttcctgggcgtcctgggacctgatgggggtgggtgatctccttgtatctgctcttccttccctgaatcgattgctcaactagcaaaggtcagttgattgcgggctggttggcacgcttagggaacaaaggtcagtcccgcagtgagggacaaggctgtcccccatctcatcctgggtgccttacatctgatgaaacctcccgtatgtggttcttagaatgcagagaggtctctgtagagtgcagggcagttccctcgcggatgtgttacggtatcccttgattgatcgtgtcgagaatagaaagacggtgagcacaggcagcatccctggtatctgaagagagcctgggagacagaactaagctagctcatttccataatttccaaaactcatggtcctcttatactaaattgactccatttctgttttctgtcttgggacatttacaccattgctggtatattttggatctcctgggacaacagaaagtgctagtggttgtgtttggccttgttgatgggaagaagccaggagagcctggataggactccccggtccttctgcctgggagggaggagcaacaggtcttgggcagggcctggtgtaagcgtggtggcaaaggtgaatgaccctccagtctggccttccttgaggtcatatggagcaggcagtgctctgaggcagggagtttcagaacccgggttcagatgtcacagctctcattcctggcttgggacatctagctgggcacataaacttcttgtgcttcccctggaaagaggggtcatgatacccttaaaaagcaaaaagaaacccccccaaaaaaacaaaaaaaaaacatatggttactttatttctccttggctggggttagccagggatgggatacagttgttgtagcgagagctcatgggaaatgctcccaggccggggacttcgtcagggacacgtatccagggccagtatgagtgaggacagaggacaagaaaaatatgaagtcagggtcagccctgcaggctctgtagggagtcccgccctgggtttgggagatacaggtgcacaggtgagtgtgtcacacccatcagaggggagggagggagggtggtgctgttaaagggcagtagtaaccagaatgaaggaagtgactgcttgtcccacttcgagaaaatgaaaatgcttcagtgtccagagaccaccaccagggacaagacttcaagttttctccacccacttggtcctcccagggtccttgggaaagcagagagggcatcagccccatctcaagacaggcatagaatactgttcacctcattctcatcttctcccatgctgtggatgagctgtgttttcttcctctccagcacgaccaggatcttctccttgaggaagttatttcactcattcattcagtgtttattgagcacctagaatgttccagaaacagggccgttgtatgagcaaatgcagacttgccccagccctcatgggacgcacagacaggggcagacggatgcttgttgggtgatcacacgttgtgaagcccagcagcgggggtgtgaggggaggcaaaggtgcctcgagagagctgggatccagaggtttgacggccagagcttgggccacacccaagcagagtgactccacctagtgaagccaacagatctgggtcatccaggccccaaaatctcactgggaacctggtgaagccatcacgtttctgaaacatccatcaggaatgtcccaagggcagcctgggtccatatcttccctcgtgtactcagagaagacaggagcaatgaactcagatctctgcccatttggactagaaaaacaacactattttgactcatgttttttgttgcacaaagaggcaggggcagggaccaggtggaaaaacgggtcttgaattacaaacaccagagttcaaagataagtcattcaggctaaagtaaatattattggatttaaaaccaaaaaccgtcaccctagtggtggactgtgctatcatttaaatgtgaaggaaaattacccttaaaatgggtgttttctgagcagtgtttgctgtttgtttgtgtctcaagaaggacctcgcaaggatgttgcttcggtgatccctttttccatccaagtctggtgttgcctggctgggtgttgaggacaggttccttttgtacctgggcccttgagtagggtctctctgggtacgtgaacaggtgccacatattctttctttaggaaaatggcaggcagctggaacatggaaaacttagcgttttagcctcaccaggcatcgtgtgtacaggagcctagatagcaaactcctttagacacagtgttagaaagttggaattaataaaatatttaatgtgctccttgaagcatttgtttttgaaaggaaacttgacgtaaactaaacttccacagacgtgttttagaagtgactgtttccagtagattttcaatgatgtctgtatacactcagctgtggctgtaaaatacaacacacatactttgtaaacctgttagtgtgacgttttcaccctgacctgaaatgtttagtatcactcagaatacgagagtcatgaagctaacaggctgcaatgtgttcggcgctgtcgcccttcccgtgcaggaggccactgtctgcggggtccggtgctttcccgtcctgggctaaggtgggtgggcagagcagcctggaccgtctgcagccaccatgtcctctggacccctctctgcaccatgcccacctcctccaggcccccacaccatgccatgcagtggccgtgacagtgtttagaatcctttcttgtcttccatttcttcatcattttagggaggaagtgctgtgctttatgtcaagatgaaacacaacatctgattccttacctggctctgctagggcttaggaaagggggcttggttaaggtggactctgctgcctgcggcttctgtccgggcccggcccctgcagctgtgacacactgccatctggtggacacgagtggggctgcgtggctttccacggggctgaatagccttcctgtgtttgaggaaagctgacaaatcctttttcattcggaagacacacaaaatgaaatttactctactatgtaaaatagagataggttagacgttcatttgccatcacctttcaacaagagcttaatttttagtttttctctgcatggtctctacttaaaaatatgcccagattttattttgagtccgttgtgttcttcggagcaaggacttttttaaaatgataaaaacagcaaactatggtttttggggttttttcccttatttgatattttacaaattataaaaacaaatgatgtagacggttacaagcaaaaccatgcagaacaaagatgtgttaaagccctgcccccccaaaatcaaggtttgtggaccccgtgtgttttctttctcagctttcttgcaagaaataccagaaagaaaaaagggcttgggtgggcccttcttttacggtctcagatatctttgtaggtaaacgaatgcattcctggagcttcatttatttctccacagtatttatccattgctgaccagcagccagaaaacatacgttttacaccgtggagcaaacatgccacaggcttttcagtggtagtttggcagtctattaaactggattttcatatcccaccaagagttaaactagcctctttattttcatcttattaatatttgttcagcaaactaacttactctaaggaataaaaggctttgggcccaggagatttaatgaatttattctccagcacgctaagtgctagatagatagttcacatttccttgttctttgaaattttatttattttattttatttattttttttttttttgagacagagttacactctgtcgcccaggctggattgcagtggcatgatctcagctcactgcaacctctacctcctgggttcaagagattctcctgcctcaacctcctgagtagctgggattacaggtgcatgtcaccacacacagctaatttttgtaattttaatagagacagggtttcgccgtgttggccaggttggtctcgaactcctgacctcaaatgatctgcccacctcggcctcccaaagtactgggattacagacaggagctaccgcgcctggccttgaaattttgatttgaaaaatatttcaggaatatttttctttccatgtgaagttgagaaccacacttgaattgctccaatcatcctcacaactcaacatggctgcagggcttctggggctctgccaaatgagatggtgcccatctgatcagagtctgccttcgtatctgtcccatcggagtctgccttggtactcatcttatcggagtctgccttggtgcctccaagtacacagttaggctgatgtggcatgcacatccgaaaaaataactctagatgtgcatttcgacacatcagcaaatgcagatggtatgggctgcagatggtatgggccacagctggagagagccgtcttcactgcggtatagctgggctgcacccaacgtgagaatggacatcagggcagagagccgtaagcagctgggattgtggaaagcgcccgtgaacacatggtcttggacagggcctcaggtgggtccttagcagctgtggctaagtgggcagagggaccaccccaccaccaccctgcccaaagggcttatttagcaaagaggggagagaggccagcctgcccctgactgcatcccactggcctgagggatgtggcctctctgcccccatttccactcctgctcttgggacacaggagactggttagatgagagtagaaagtttatttttgaacacccaggtgtggggtggctgggcgagaccatctgatggctttgggagccaggccgcagggtttagcttggatctgttgagtaggagacccttaaacatggccaccctgagctaagagctggtcttggattttgctttcttttggattaaccgagtattttgtgggattccatttgatcccttaactggctgaccagctataactcctggttatgttgttttagtgttgctccaggtgtcgttggaggagaagttgaaggtacaaggagtttgcaggagggaaggtggcagttaatgagccttcctggtgggaccggatggtgagggcaggggcatctggcccagcgtggactcgggccatagatgggaagtggtcatttggaggtcaccatctctctgacaccctgaccatagcacctgcacccctgtgctgagctgcaggtccccggcaccagcgtctgtgcagctcaggtgttgctgagccgtggcctccgcagctctccatcaggatttctcaagcttcattatgaattatctctgtgtgagctcacaacggtgactgcagagtcccaggtcatctctcagatcttctgaatcaaacatatggtctgcagttgccgcgcatgtctttggccgattttctgacaatcaaagtgaagaagttctgagctacgggaagttgggttgaaggcatgatggggaaaacatgattagttgacagcttttcccagagagtttttagacaaactcaaccttggtaaccttctcagtgggcttatgataagaaccttcaatgtgccaaaaaataaaaaaagcagcactccaggtagttaatctttgtttaaaaaacccttccccccacccagtcctgcaaacaaacaaacaaacaaaaaaaggagaaaaaaagaaacctgtcttttgttggatgctgagccgagaaagaagtaacaccactgccggcctctgcctcttgtcccgagacaccctcatggtgcagggctctctccagggtccgttcctcatgtgcaccctctcttgtagttccacagcccgctgtgggtcccactgagactcctacctgaggacaggagaagagggtcctcagggacgtccaaatgaggacaagagaagaaggggcctcacagacatccaaataggagaagtgtgaaaagctaaatttggagtgtcccatttttctgcttctaaattacaaaggaagcaaatgttttgttttgttttgtttatcattcatagccccatcttcatgttatccatttaatgcttttaaagtatttaatattttgtctgttttcgtctacaggtagaagagagaccagaaaaagattttactgagaaggtaaggaatcgttcataaacctagagggtcccaaaagttgtggatgaaattgataagaaaatatgttgcttggttttttttaataaggatgttccccagcgagggaactggactagaaagcggcccacctaacctggtatcaccttcccggaggtaggccaccgggagtcctgtccggtgtgcgttagatcctgtagagcagggaggcgtttataatgggccccaccatggagtttagggttaatccagctaatcgcagagcatccaggaggtgcctggaaatgatcccctccttacagtttactataagcccatgaagagtttccaatttggaaatggaattaaagtaacagtcctgtgatgttagatttatatgcagttttggttttgtctgaaatcgcatctgtgttagtccgttctcacactgccataaagaacttccctgagactgggtaatttacaaagaaaagagctttaattgactcacagttccgcatggctggggagacctcaggaaacttacaatcatggtgaaaagggaagcaggcaccttcttcacaaggcgacaggagagagaacatgtgaaggaggaactgtcaaacacaaagccatcagatctcctgggagcccactcactatcacgagaacagcatgggggaaactgcccccgtgatccagtctcctcccaccagggccgtccctcatcttgtggggattatggggattacaattccagatgagatttgggtggggacacagagctaaaccatatcagcatgtgatcctctcaacgttccaggggtctcgtaacatgccgggcctgtctgcagccacgctggcctctctgggtgggacttcctctcggagaggcagcggagacacctccatctccatcgacaccgaggcatccatcagggaaatcaaggtgagatgctctcttcttactgacaacttgagagaaccttttgtaaaaatcagtctttagattaaaaaaaaaaaagttaattcataaagttctggatctttcttcttggtcctctctccctcacctcccctaaaatacggtgttctcctaacatcaagacccagctcagatagtgtctcctgcaggaatctgatcctacccactgaccccccagcagggcggaccgtgtgccggccccctgcgcccctcagcacccggggaataccttagtgagagcacttggcacgttgtgttgatgcacttggtcgtctctgtatgcttggtctgcatagacattcagtccacaagtttggacaccagacggctttacctactttcacacaacccctccccactaagtatgttccccttcggcctagaacttgccctttcctttctctttgtaatgtgcctttagtagccctcatctttgtattttaatgattttttttatcccactgtagtgtaggtattattctctgctctatcctcagcacccaggacagtgccaggcatttggtagtattctgtgtgtgaaagagaaacacggtgctatttgttaaagtaactagggacagtgcatctgaaaacctgaagactggaagggcaggtgaggtgactagacctgtgtcctccagggagcagaaccaagacagaagcagctgaaaggagccagaactgactcagattctgaattttctagtgctttaaactaggtttaaaagggaagcaacttccactggggatgtctgagcagctggatggccgtttgccagggaggacggagagggatttaagcatccaccagagtttggccagggttaccttgaagatgcttccaacacctatgttttataagtttacaaaaccagaagagccatttcccatgtgccacccctgggccacctgcagctccttgttgcttccctttttttttcctttttcttttcttttctttctttctttttttttttttttttttttttttggagacaagagttttgcttttgtcacccatgctggagttcaatggcacgatctcggctcactgcaacctccacctcccaggttcaagtgattctccagcctcagcctcctgagtagctgggattacaggcgcccgccaccatgcccggctaacttttgtatttttagtggagacggggtttcgccatgttggccaggctggtcttgaactcctgacctcaggtgatccacccactcggcctcccaaagtgctgggattccaggcgtgagccgctgcgcctggcctgttgtttccgtttctacagcagagcagcagagttggcggcagtcctgatgtttctctgcccttaggttgcgcgtgccgttcatttgttcaggtacttactgagaggctggctggtgccagatgctgtccccggcaccaggaatttggcaaagtagagacttggagctccataaatgcagggaaaaagtgctactgatttttgcctctagcatcttactgtacattgcacagagtaggaactcctagtgcttgaatgaattactaaataggagttgaaataacctgtaccgttttccgaggctctattttgtctgttttttaaactgtgtaaaatcatatgagatacactaaaattgtataaaatcatgtaaaaatatcatatgggatacacctgaactttaatctttaaatattgaagtttattttcccttaacgcttaataaaataaaaaagaaaattgggtgctcagactacccaaatagaaactaccctgaagtataaaagatttagggaatcacctgttttcccttgacatcatctgccttttttgccatttcccccaggaactcaatgagttaaaggaccagattcaggatgtagaaggcaaatacatgcagggattgaaagagatgaaggtaccaattcacagacgtgtggtctcacgatattaacccaacttaacttaaaaaaaaaaacaacatcctaaagaagaaattcaaagtgcatgcttactgtaaataggctccagggtgtagaagaactcacaatggcaggagtgccggcatgggtgtacactcaccattttcccaaatgcattgtttgaaccaagattgaaaatgtaactgcccagtagaaaaggttactaacatactccctgatgcatgccttagacttaccatccttcccccaggcttaaaaccagtttctcatttcccataggcgtgtgccagacacttgaagaaggttcttggttttcttcactttttgtagtagttgtatacaaaaatgcttcagttgatttgcttctcaaaatatctgatgtctactaataaggccgtcctcacatgccacacttttgaaacatcccaattatttgcaccctgtaaaatgctactaattgaagtaaagactgactatggcattggctttcttggagcgtgtgcacactgcttttagagtgtgcagtgacttcattgcaccagccaggagatgtggttgccctgttccttgacagtaaggtgggcaatcagtgactgtcttccttaggcagcagcggatcatggatctggaagtgggtggcgtatctgttacttccttttcagccccctagaaagtacctgcaagatcatttgaatttaatatcaaagggcaccagacagaggaggtgacatcgatcatgactaattcactatcttcatatctgccacctttcctgaaagggggaaaaataagactctggctttcaattcatgcgaaaaggagccacttggccaggcgtggtggctcacgcctgtaattccacactttgggaggccgaggtgggtggatcaccggaggtcaggagtttgagaccagcctggccaacatggtgagaccccgtctctactaaaaatataaaaattagccaggtgtggtggtgcgcacctgtaatcccagctacttgggaggctgagtcaggagaatcacttgaacctggcaggtggaggctgcagtgagccgagatcgtgccactgcactccagcctgggtgacagagcgagacactgtttcaaaaaagaaaaaatgctgctggggagccactgaaccaaccggagacccgctggtcccacgtgaagcagctgtcctggtgtggaggtacagagctagaccagcactggtccctccagccccctggtagcctctgctgcacctgaactggcagctcttgccgctgcctttagctctgcatgtatgcgccctgaaggttctgcctctctgttttggaatcgccttcccctcctcatgtttggggacctgcaagggtgtgaggcacgtgagggcatcgccatgcgtattttacaggcctctttctctggactgtccttcaaagggaatgacctttgtctttccaggacctacccagtgagatctgcctgccattttcctatgagtcaaaaatctgaactcactactgctcctttcctggttcataagccagagtagggctggttggcagtcactggcttgtggccctatgtaattatctcagccatcacacactggctctttcacaagggctggtcacacgcctcgagtgattcttcagaaatctgttgaacagcctgacacccagccctaggacgccgtgctggggggattccccagctactgagtggggccagagactctactgcctctgtgaccacatccctttccatactggtatctcgtttgttctaatgagtgtgtccattgcttttaatagtgaattttctgagcaatgagaatttgaccaaattgaaaagggggatttccatgcatttgaaattgccatgtgtttcttcttctgatccatttgctctaagaaatatagtctaagtttaggactgagggtttttttttaacagaatactgaatgattctttgttttgatttttttattgcaatttcaaaaatatgacctgctttccacaggactctctagcagaagttgaagagaaatataagaaggctatggtttccaatgctcagctagacaatgaaaagacaaacttcatgtaccaggttgataccctaaaagatatgttgctggagcttgaagaacagctggctgaatctaggcggcagtacgaagagaaaaacaaagtaagcattagtatgatacagaatgttaacaataggctgcgtgcagtggcccatgcctgtaattctggtactttgggaggccaaggtgggaggattacttgagcccaagagttcgagaccagcctgggcaacatggcgagacatcatttctaaaaagaattaaaacaattagccaggtggtacatggctgtagtcccagctacttgggaagctgaggtgggaggatcacttgagcctggaaggttgaggctgcagtgagctgtgttgacaccactgcactccagcttgggcaacagagaagacactgtctcaaaaaaaaaaaaaaaaaaagggaatggtagggtgtgtgtgtgtgtgtgtgtatgtatgtatgtatgtgtggatatatcgtgtgtatgtatgtatatataatgtataatttacattatgtatttttatatttttaaacaatggctctccgcttatccaggaaatccaaacatctgagaataaaagtaccatactctttgccaagtgacttgaaatattgatacgtataatttcaacatgtaaactggagacagtttttctaggagaacatctaagctaaaagcaaaaccatgaaaaaacatacctatgaaagagccaccatgctcagataaggtgcgatcagatgcttcaagattttcctattcatatgtattttctgatttttattttgttctctctcaacaccatagggaaatagttatgagtatcaaagattttaagaaaattatattattttctgctgattgggaaaagacacagttactctacttaagaattaaatatatcaccaagctcagagagagagatagtcttatctgagctttcattaggaaccactggaactagtttgttaatagctgagatcagatataatttctattgagagtctcaagcatgagtcatgtgttaagataagtaatgacagcggactgattccacgaaggctgggcttggatgttctttagatagaaagcaaggaatacttttttcatacttttaggaattgtccaatttttcagagattctgagaaaaacagaaaatgtaatgtgtgagtgtcgttgttgttgttgtttttaactggctattatcctctaaatccaaagggttaaaaccaaggtacccttgacaaccttcaggcctgcttcttcgactgctatagaattgagttggaagctgaagaacattttacgcacaaagttccttatagctgaactctgcaagaggggagcttttcacaagactgatgtcatgtgggaacggaggagtggagagcacagcccagccccccttcgggtgggggcctgtaatgcatatgcattcctcctggaatgctgtcattaggcatcattcagtggactgaaaactcccgagtctcactccagagaagctggatggtgctagaatgctgtcccgagatggacacaggggccatgcaaagccccacaggagggcccttgtcatagccaggagggcaccagccacccccaagctaaaggaagtgggcgaacagaagtgccagggtgagcagaagctcaggccagatcccatctcagatcacccgcctgacaggtctagggaaggagcgtcctgcaggcctgtaagctgtcagcaaagtgagttgggtctcaggccgtcaccagggattgcgctgctgtgactgggcaggaacacagcagagccgagctgccagcttcctgggctgagcctcaggtggggaggccaggcctgaggagcagctaggttttgcaggctctccatttgctcccccaaactctcctgtttttgtctcttaaggggcagccctgaagcacagagctggccaccagctgttcatgagagatgctttagtaggccatgtttatctcctttttatcccaaagagttttccttgtcatatttcagcaggggccattttatggtaagtccttgcagggcagcctcacccaggctctcagcacagtgctgtggaagacaccaggctccctgggggggcccttcgtcggctcttgcttcactgtagataagaaatcagaaaatccttgttgattgcatcaactcctcaggttaatttgacagtaagtcatcaggcatcatctataaagtccagaggaatctgtttgtgttgtttgaaagggcttgaaggccaggtgcagtggctcatgcctgtaatcccaacactttgggaggctggggcaggtggatcgcttgaggtcaagagtttgagaccagtttggccaacatggtgaaacccgatctctaccaaaaatagaaaaattagccgggcatggaggcaggcgcctgtattcccagctacttgggaggctgaggcagcagaatcgcttgaacccaggaggcagaggttgcagtgagctgagatcgcaccactgtactccagcctggacaacagagcaagactccatctcaaaaaaatatataaataaaaaataaaataaaagaccttgaagattgtgatgatgtagtagcaggtgatttgttccacagaaactataaatcgtgagagcctgaactggcatgccagaaacatgggattccactgctttagtgctgtttttctcctttacaggaatttgaaagggaaaaacacgcccacagtatactgcaatttcagtttgctgaagtcaaggaggccctgaagcaaagagaggaaatgctcgaggtaggtagcattctcctgcttttcttttccttttttccctttggagcattttgtcaggccatgactatcttagcttaggctgcagtaataaaataccatacacagcatggcttaaacaacagaaattaattttcttacaattctggaggctgggagtccaagatcaaggttgggttcaggtgaggcctctcttcctggcctgcagacagccaccttcttgctatatccttcctccaacggtggagaaaaagcaatgtctctgatgtctcttcatataaggacactaatcctatttgatcaggaccccactcttatgacctcatttaaccttaattacttcgtaaaaaccctatctccaaatacagtcacattgggcattagggcttcaacagatgaatttagagggacacaattcattccatggcaattactaaagttttcagttttcttaaatctgagagtttaggctaactctccatccctagatttacgaaacagtccctctcattggtgaacattcctattctttggtgatcttgtatttgtttggggaggtgtggtagacagaataatggtcccccgaagttgcctacatccagatccctggaaactgtaaatatgatgccttacatggttaaagggcccctgcagttgtgatgagagaccttgagagaagggattatcctggattatttgatggaacaagcatccttctaagaggaaggcaactcaaaggcagaagtagaagatgtgacacaggaagctgaggttggagcgatgcgagagaggggccatgagccaaggaaagcagctcagtcttagaagctgaaaaaggcagggaaacagattctccctagagccttccagaaaggcttgattttagcccataagactcattttggacttctgacctctagaattgcaagagaataaatttgtgttttaagctgctgaatttatgacgattcattacaatggcaataagaaactaatacagggttggtttttaattttttgacttaatcggttctttaactgctgccttgaagtgagaatttcacccaaagcaggttttcttcctgcacttcttgaagccggaagtaggacaaggaaaaaaatcctagaatgctgacaatgagttcagggttgatgaggtgaaagagtgcttgcggcctcactcactgtcccagctctcaggttctctctcgggctggggtttttcttcctctttaaccctttatctgctttctgtctgttcctttcctcaggaaatccgacagctacagcagaaacaggcgagttctatcagggagatttctgatcttcaggaaacaatagagtggaaagacaaaaagataggggtaggattcccaagtcttgaaaatctactcaaatgggcagcctgcttagcaaatagagttttttcagagtctttagtttgcaaaaccgcttgtctgagtatgcatgcaactcccacgtgacacaaagtcgtattaatttatttaattttattaagtagtgaatacactaacttatccaaattgatatgaacttggattgtgacacggactctccatggagggtcttgtgaatgcgtagctgtgcgctctgcctgccccgtggctgggccgggccggtggttgttgaaacagctggagtgaggaggacactctgaggaggtctgatgtgtgcaagtccagacgtcttgggattatctgcctggtggtgctttgagaaaaaaaatctaagcaccaccaggcagatatccccactttgaaatcttccccagggaaggtctccacatacccttctccctccacaagaagaaaagaggcagttctacacttagaattgaaggatagggggaacagaaccccacaaagtagttgtcatgattggtaacaacaaatggtttccccaaaatggtgattcctacacatagctctaataaagacgtcgagatacctgcacaaaccatcggcacgttgactcaagccacactgtgtttccactgtcacgctcatcagcacttaggagtgtgtgtgtgtgtgtgtgtgtctgcatgcacgcacactttaggaccacttcatttatctgagatgatggataccaagaatcagtgtataaaaatagtctaaatggctacaacagccgtcctgggaggtgcttaagcaatcccttttctttactgacccctcattcaagtggagactttgcgtaactctaacgcagctgtgaacacgcagacaaagctagaaagtgatgcaaatatagtaacctctggggccccgtgctgtgtccgtgtgcttcaagatgcgcatgtctttcatggagtatgaacagtaacatttcttggattatatatactaagcgaaaagcttaatacttggattttgttagtatctttaggcagagtctctttaatgtctagagtccactagtgttttagatggtagaagcctccttctggttcctgcttctgaagtaacttgctcatctgtgcaaatcttcttctttctcttggctctgctgcacactcaggcattagagaggcagaaagagttctttgattccgtaaggagtgaacgggatgatcttagagaagaagtagtcatgctgaaagaggaattaaaggtatgaagccaaactacagttttatttaaaaaaaaagaaaaaaaatccaggtgacaacagcaaattttgggatgctgtgaatatgtgtgtacataattcattttatgtcatttagttctgttaataattcatatattgggttaactgacagcgatgagatgtaaaataaatgtaggttcagtgggtggtgcccaaggccttttgatgttaataaacatagccaatcttgaatgcaagaattttttgatacattatctaaatttttctcatactcactagtaaattctccaggatattactcagacttagagaattaatttgcctctttatattaaaacccccaatttaaggacttctctagaggaacagtgacttgggtaagtggtttgggcaaggatcccgctaattagactttgagacctactagattacaggtggaagacggttccctgtccttggtgggccacgccaaggcgtcttcagccgctgcttgacacaggtgaagcgccagtggcagcactctgggtgggggggttcctgaaccgtcaccatctgctgcttggcctccagggtcaaagccagagcagtgagccagccagctacaggcttagagctaagattcgtaattctgctccttgaagaggcgatcagttcaggggagttcctcacacacaagggagagagagccacaggcggcaggagggcatgggtgagtgatgtctgcagttgggaagtgctgctgttttcagtgaattctgtttcttttgaatatactgaacattctagccacctctgaattccttctttaacataagtttcgtgtgtctctttcagaacatgtatatatttctttctttatctggtttctctttttaaagaatgcaatcagggttttgaaatgaaaggtcacttggcagtgacttgcttactgctccacttgggggcagcccacaggccactacctgtagttaaaaaggatgcctggtggaagtagcttgtcaccagcaaatgaaagcatggattggaacatctgagaaagaagtagcctttggaggacgatatcccagatttgtgtgtgttgaccgaatatttacgagtgctgcaccctagcatttctcttgtctctgtggagttaccctgtacttcaggaaaaaatggttttcttttttattattgtattaaaacagagtttaacctaatatcactgagtaaatattacgatgagcctatttttgttcccagaaacatggaataatcctaaattcagaaatagctaccaatggagagacttccgacaccctcaataatgttggataccaaggtcctaccaagatgacaaaagaagagttaaatgccctcaagtcgacaggggatgggaccctaggtaagtatttgctttccttcggctcctcacacctttccactcagcattggttcaccctccatgcactgctggggttggagccaccgtcgctgatgggttaacagtcaccagcatgccatttgtttcatcacttcatggtaatttccttgcccacccggtgtggtcacccacgtgttgtctggcatgcatctctgtgtagtgcaccatcaatggctcaagtgaaccttttcttttgctgctcaaagctaccaagcaagactgtgaaggcaaaaggaaaacagtctcaaaattaagtaacaatgtggagagtactatttggttttcctcagacacatatatatctgtacctataaagtgtggctttttaaaccgattctatgacagaattatcaaaagatcagaatggttgaggccgtcaagtcagttggccatatttgcaagccaacatcgacatcctgggcagcattcagcgctttgagggtacggggtgcctgtggacagcaggtccgtctgtgttgcctttttcaagccaccgctcgaggtgggcaggcggccgtggtagtgggtgtggcggtgctgagagtctgagtatgcccacctttgtcagaggggatcctcctttgtatgccacgtgtttgcttctgaaagaatataaaactggggaatccagtagatcagaggaatattttataccattttcaatgatctgatttgtcataatttgtcataagagttggctttgggagaaaccttcagattctggcgtgcagcctgaagttgcagcgtgcaagtgaggcctcatctgtcactggtcaccctctgcgttccagtgttttacaaagaggctggaataaggtcagggtccgtgacttttcattttaatgtagaagctttcatcttatttctttttatttatggaaatgtagacacctccaggccccatcttctcaggcctcgcattccagggaggtacctcattcattatctttatgactattaaagaaacacagctcttttcaattgtgtaaaaaaagttgtggcctagtgcagtggctcacacttctaatcccagcgctgcgggtggccaaggctggaggatcacttaagaccaggaattccaggccagcctggcaacctagcaagattccgtctctagataggtatgtagtatctatataccgttgttgagaaaagataaattaatcaatttccatcatacctttatatgagctacccgaacagctaggaatctgattacgctgctcttactcaaatacacattttataaatctttgataaccattgtgaaatgttgtaagaaccagaaatgtcagttttgaaagtggccttcaaatgacttttgatcacatattccttcagcaaagaattgtaggatccaatatgtatgtttattttaaatctacatatgtatactatttcattaatataaaatgtacgttataaaatatatgcaaagatatgcaaagaagttttagagtaaaactctaaatagaattcctaatatttcccccattttccctgggatatgggcaccccaccatggagatcactgggctataaaattatctagctttgactttcagtaacatagtaccatatctaatctgctggggttttgtttggagagtccaaaaattccaaaacagtttgatgttctttagacgatgaataatttatcatttaatttagtggtcatcttgatcttgaacatttgcctcctgctggtcctctctccctagtcccttagggaatggagcagaggtatcagggcatggacacagggtgttttctcaggaaaacaatagttgagtggcagaagatagatttcctttcatatgagctatttcaaaagcatcttccttgagactgaccttgaggctgcatttctaaaagtgcactgaatattctttttaaaaattacttgaaagctgcttttagggctgtgtgacatggagtgcagtttgacagctgcaaaagtacaagttgtcaagttgttcattgagaagtgagagtggggaattgaaccttcagtctgttcctaaacccatcattgtggattgtttggctgcctgatccagagttctttctatttgttgaaacttaacgtcacctttaaaaatctgtccacacaagatggcaccagcagccactctggcctttgatgtggtggcagtggccctcactgacccaaaatttactaatgcaactgctgctttgccgcacagaactggcaaaggcttgtttctcatgactctttgatgactctgtctttaggaataggggtgggtgggatttggaacgtgtgtttacattctaatgtagattatgtggccgccacatcatggggtcccttcaattttctcaatggtcttttaggaagagccagtgaagtggaggtgaaaaatgaaatcgtggcgaatgtggggaaaagagaaatcttgcacaatactgagaaagaacaacacacagaggacacagtgaaggactgtgtggacatagaggtattccctgctggtgagaataccgaggaccagaaatcctctgaagacactgccccattcctaggaaccttagcaggtgctacctatgaggaacaggttcaaagccaaattcttgagagcagttctctccctgaaaacacagtacaggttgagtcaaatgaggtcatgggtgcaccagatgacaggaccagaactccccttgagccatccaactgttggagtgacttagatggtgggaaccacacagagaatgtgggagaggcagcagtgactcaggttgaagagcaggcaggcacagtggcctcgtgtcctttagggcatagtgatgacacagtttatcatgatgacaaatgtatggtagaggtcccccaagagttagagacaagcacagggcatagtttagagaaagaattcaccaaccaggaagcagctgagcccaaggaggttccagcgcacagtacagaagtaggtagggatcacaacgaagaagagggtgaagaaacaggattaagggacgagaaaccaatcaagacagaagttcctggttctccagcaggaactgagggcaactgtcaggaagcgacaggtccaagtacagtagacactcaaaatgaacccttagatatgaaagagcccgatgaagaaaagagtgaccaacagggagaggcattggactcatcgcagaagaagacaaagaacaagaaaaagaaaaacaagaagaaaaaatccccagtacccgtagaaacccttaaagatgttaaaaaagagttaacgtatcagaacacagatttaagtgaaattaaggaagaagagcaggtaaagtctactgacagaaagtcagcagtggaagcccaaaacgaggtgactgaaaatccaaaacagaaaattgcagcagaaagcagtgaaaatgttgattgtccggagaatcctaaaattaagttggatggaaaacttgaccaagaaggtgatgatgtacaaacagcagctgaggaggtactagctgatggagacacattagattttgaggatgacaccgttcaatcatcaggcccgagggctggtggtgaagaattagatgaaggtgttgcaaaagataatgctaaaatagatggtgccactcaaagcagtcctgcagaaccaaagagcgaagacgcagatcgctgcaccctgcccgaacatgaaagtccctcacaggacattagtgatgcctgtgaagcagaaagtacagagaggtgtgagatgtcagaacatccaagtcagaccgtcaggaaagctttagacagcaatagcctagagaacgatgacttgtcggcaccaggaagagagccagggcacttcaatccagaaagcagagaagataccagaggagggaatgagaagggcaaaagcaaagaagactgtaccatgtcctaagctgaggcaggcggcaggcgcggtgcacaggaagtctcagtgtgaaggggtcttttctctccactgccaatgtaagtagaatgttctaaattcatagagaggcactgtatgacaattaccaggtgctctactgctttaagttatagactgttacttgtagatttccatgtaatcattgaggttatcacccagattagaaagacatatttgttatcagtgtacgttctaattgagagcattccagtagtatcaaacaataatgtctactgtttatagtccacttaataaaaatagaggcatttactatttgccttaggctgataggaatgtgggttttcttgaccaaatatatcagcatctaattgaaatgaccaaatagcattcttagacttctgtattatgaatataattgatatttaaattaatgtcttgttcacatatgtgtactttcatatttgattttaaaatgtacattataacctgtatggtattttatttaaaggagataaacagccaaatagcaaataggtcactgaatgataagatttgcaccttagaacaataatcattttaaggataacaagtaaatgtctgaaagcatgaggggctttatttgcctttacctcatatgagtctttgatcttgaaccgatacttttggatctcattgttgatatacctgaatttactttgtaagagattttaacttcacttcatgctgatgatgtatcaaattcattttatagaaagatttaaagtttttttctggaagtgatatatgtcaaattacatttcctactgcagtatttgagcagggacagtcattttttaaatgtttttggccgggcgtggtggctcatgcctgtaatctcagtacattgggaggccaaggcaggtggatcacctgaggtcaagagttcgaggccagcctggccaacatggtgaaaccctgtctctactaaaaatacaaaaaattggccgggcgtgatggtgggcgcctgtaatcccagccactccagaggctgaggcaggagaatcgcttgaacctgcgaggcagagattgcagtgagccaagatcaagccattgtactccagcctggacaacaagagcgaaactctgtctaaaaaaaaaaaaaaaaacacacacacacacaacacaatgttttcacgcctgtaaacctagcacattgggaagccaaggtgggaggattgcttgaggccaggagttcaaggctgcagtgagctatgattgcacactgtactctagcctgggagacagagtgagacactgtctctaaaaaaaaaaaaaaaaaaaaaaaaagtttttgaaccttaaaatactttgtttgaatttctaatcatcattcaaaagagcagtaaaaaatggttacttgttcttgtacaagctactaattagactatagtaggatattttaaagagctgaatcacttttggtattttggtataaatattttcatttgttatgtcccagtatattcttactggaaaattcttgttttgatctgcctgaagaaaatatctgttttctatataaaaaaattttttaaaataattgtaaagttagatttaaaattgtaaaatataaaatcacaaaggaatgtaccttatgaatgttgttgacattttatgaaattatgtggattcatattactgttacaagatagaattgaatgcaaaaagaccaaaacctcaataaaatttgaggaaaacgtgttattatgtaattgaaataaaaacattttataattgtgcaagcctgtggttccactctttgggctgcttgaagtctgagtctgactactgttgtatgtaataccacctttgagtaatatctgcttgggggttgctgattcctattggggttccgtggaagacccacgcctgatgccctccctcagtaaggaatgcacttccctcctggcatcgagcctggggctagcatgggcattactgggagaactgagacgattgtcacgcaccatcccctgtgatctgtggttctgatgtgcagcctcagctgaaaacggtcttcacctgtggctgtgcttacctgcgccactacttacagtgttttgaagagcaggatgaaaacggcaaaaaccttgactgtttctgctcaagtgtcctgaagtagaggatggtggggatgataaatgcttgctaggaaataagtccaagggctctataggacttcacagggttttagtttatgtctctaactttagcaaagctgcattcctattggaatgcatactggaaacagctctcattcctacctttaaagggctcttggaaagcagtgtgacaaccaaggtcactaaatggtgagatcatcaagccattttaagttctttctcatgttattcaccagcaccctgcaggacgttgggcacacatcacatccctcagctcagccatccagccgtctcagtgattcaccactcatttgcttaattaatagacaggtttgatcactttgtacatggaaggcactgtgccagtgaacaagcagttggacccagccctccagtagggaatggacagctgaaaatccatgagcaagaaagaaggaaaaagaaagagttctgagcagccaaaccatttctcgatgatttcagagccttcattctgagcatcagttatatgctctccagtgtaatgactttatagccaagcacagtaattgatattactgtgaaggcccttaacttatcaagaaatggttgaggccgggcacattggctcatgcctataatcccagcacgtgggaggccgaggcaggcagatcacttaagcccaggagttcaagcccagcctgggcaacatgatgaaagcccatctctacaaaaaaaatatacaaacaattagccaggcatggtggcatgtgcatgtagtcccatgtagtcccagctacttaggaggcagaaacacctgagcctgggaggtcgaggctgcagtgaattgtgctcacaccactgcattccagcctgggtgatggagtgaaaccctgtctcaaaaaaaaagaaagaaaagaaaaagaaagttgacttagctatactccatataagaaggtatagaaatatatagagcaatttagaaagattatagtgtcaaaagattcaaactcagaaaagaattgaaaggttgcctgccagccatatccccagacgaacctagaccactggggtttcactatcatacagaatagagaaaaacattggttactgacacctgaaatcaaaaagcttggatatttttcagtcccaaaccagaacatagctcccgtatataaatgtaaatcttccttcaaaagtataattaagtataattatgggtgtatgtcaaaaatatagaggaagatggatttttacttataggttgttatacaaagttgggacagcaatcaaatttttaaacagttttcaagaatgtatgaccttaaaagaaatgtgtgaccctgatcactttccatatttgtaattaaccggagacctaatggtctgaacacttaagtttccactatcactaggaccctgaatgctaattctggggagtttagatggtttggggctcctgttttctattcatagactccctttctgggagaccaccccccaaccctgtacagcgtaccacccgtggccaccagccaagggaacacaacagtaagatttgttctaaacgtctgggcccctaagggaaagggaggggtgtttgtgtgtgcatgtattatgttcagaatatgtacttgttcagtgtgatagttgtacgtggagaaaactttgtctttcaagaggaaaatccttttgttctttttgtccctatctactgcctctcttaaatatttttcaacatgtgaatggctggtggctgatacagggaaaaatttcccagctatacagacactataagtctaccggtgatgtgccactatttattcaacaatatagacttggtggtttttaacgctacgaaaactagtactctttattttcttcatgtcaaattattttgcttcatttctttttccattttcttcaaactctttcgttcttgttttcttgtccaagtctcctttagaatttctcttcctgaaaagtttcttctctatttataatgttctcactatacaactaaatgtcagattacctatatcaattttgcttgcactcttattacattttaacacttattttctagtgcttatgtagaatatttgaagttttctagaagaaaacaataacaattgtacaatagatacttgagcttcaagatcacattctggtgtattcagtgtttcttatgacgcctgtagtttttgtatgtaggagtattaaaacatgtaagaaaatgaaaagtgatattgggcaaaagaatcaggttcataactgcaaaaatgttttgtttcaatgttgggtgggttatgggggggagcgagtaaaacatctgtcagaagtaatttgactgtaaattaaaatagaactcaaaaggatgataaatttaatttatattgtgcttaacattatctggtgtttactgtgcctttcaaaacaacttaggatctttggaaaacataattagagaaaaatgtaacttggattagcatgtggctagatgattttttaaatgaaaatgaagatgcattttatatgaattattttcttttcacatggctaatcaaggttagtttttcattctatgaagaatctggaggtaggccgcatgacagcagtgtcctagtgagctaagagctttgagtcagggtctgactcgggcgtgtgagtttggatctggaaaaacagcgggtgcagtgtttaggggagtgttcccgtggctgggccgcaaggcctgaagaaacttgcttagtggttctgggcctctgagcctcatctatagaaggaggctatgatgaagcctacccatagggcttctggggctgaaacgagctaatgatgtcgaagctgctagaactgtacctgtgtcagagcgagtgtgcagcatacgttatcatcactgtcatcactccagcattctgactgtgcctttaaactagtgtgggattttgcccaaacctctaaaccctcccctagccgtggtttcccccgcagtctgaagactctaatacttgacactcgttcagagagatgtttggggaatttatagacacttaacatttatgcatccttatatatcgggtccaggaggaattacagacacttaaaccattactgccttcttcctcaaaagaataacagctttggtaactgggttagcagaggtgttagtggacttagggttgtaaacagatactcatggcactgacatcgatgagtctatgagggaaattagaaagataaatacatctgggatgtaaactcggaaaggcgaggctgttcaaaatgttggtgctattgaattgtgattctcggtgtttgtacattgctaataatgttaaaccatgaagcctgtgagatcttgtgttgcagcgtggtttggccctagcgttcttgcatgctaacctaaggtagaagattagcagcctgtttgcatgcagccggatgctgcccctgacgtgaagcatgttctgggaggttgacccaacctcctttggctgtggcctcattcaccccgtcctgtctgtggcctcattcaccgtggtacgtgtataactacttccatcattcatttcactaacctgaacgatcattcttcagtttagcaatgtgctgaaaggcgcggcacgcggattcacctaaacctgtgtctttgtgatttctttagatattaggttgaaaaagctggttgatgaacgggaatgcttattggaacaggtaacaatctttttattactttaccggttcatgaacagggcacctgaaaccacctgcccatccttccttcttgcttactcagaaaacccctaagttaatcatgtctgaaagtctttatcaagccaactggtgttcttaagattgctatccaaatagaacatcaaagttaatattttcatccaaagagaacatcctgagtcatatgaggtttaataaggatgtctcaaagacccaaagccatggaattgaatttggtacattttactgaattgctgcttaaaataaatataaatgttgattattaataatattaatgattaactgttgagagacaagagcattactgagtcattccaaatagcacttctcttgtccatatgggttgtttgtccataaaagtcagttttgtactcttggtgatcagcacccctctctcacaggtgtttctttgttacagctaaacaaagttgttttaaccatgtttatcttcattgctctctcctacctcaagaagtagcaggccaggtgcagtggctcacacctgtaatcgtagcactttgggaggccaaggcgggcggatcacttgaggtcaggagttcaagagcagtctgccaacatggtgaaaccccgtctctactaaaaatacaaaaattagccgggtgtgatggtgcgcgcccgtaatcccagctactggggaggctgaggcaggagaatcgcttgaacccgggaagcagaggttgcagtgagccgagatcgcaccactgcactccaacctgggtgacagagcaagactccatctcaaaaacaaagaaacactgaacagttatcctatctgatctttttatatgcaggatagtgattaaatcactctacaaccactttcctctaatttctcctcataagcctaatcaaatgtatttgccttacttcctaccattctgttgaagattctccgaaaattggagaaagcactaaatatggtaggaagattctcttgaagttcctgtgatcttttgaaactgcattcctgagttctatccttacttccttaaagcagcatgcacttttggtttgttgttaatcaggggtctcctgtgcttggtgtgtggggtaggaaggcaggtgatcacctgcaacaattcttcacagattggaagttaaacatgaaaagcccccggagaccccacgaactagatgccagaaagttctgcagtcattgactgttaactgcaattccaactatacggtcagccctccatatccatgggttccatatccgtggattcaaccaacatggattgaaatattccaaaaaaaaaaaaaaaaaacccataaattccgcaaagttccaaaaagcatagcttgaatttgccctgcacggagtcctgcactgaatccacacaaatgaagtgagttgtaggcgttgggtattaaaaggaatctagaggtgatttaaagtgtaccggagaatgcaggtaggtttctgcaaatactgcaccattttatatcagggacttgagcatccacagatttggtgtctgaggggtcctggaaccaatccccccccccccccgcccagataccaagggacaactggacatgtttctgtcttgcttagagaggggaaagctagctagagaccaactccctgaaagctggcaaaccgcctctgaacacacctgcagctggcctggacgctgagaaagcactcgacttttgggggacttaattacaatatattggagcccagaaggctccaagtggccctttctggtttcttagtaaataaagagaaagtgaatagcatggtgacttactgagtcttaaacattgcaggtatttcatgtacagtctcctcctgagtcctagaagaatttcactttagaaatgacttttctctcagagttacagtgtaattcatttttcattcattgtacattgaattgtgtttctgagaagagtactgatggacacaaagtgccttctgtcatttgacatgctgcttcctttctgatgggctctaacttcagcttttcggtctcattcagagtagagaaattaacagattttactggcgggtgttttcagattaagaaactcaaagggcagctggaggagagacagaagattggcaaactagacaatcttcgatctgaagatgatgtcttggaaaacgggacagacatgcatgtaatggacctacaaagtaaatgtcaattcttgtgtagaagtaaatgctttcacatgtgctgttttagtatacttgtgctggcagagaaaactgtcacggcaaagaatgccctcattccctcacatccccacaaaagcccttaaaaataaaagcacaaggaggggtaggtagacagaacaatggtgtttctctctgagcctatgaaatagaacaggtacccaaaaacgtgcaccaagataccaccacatgttgtgccgatggaaaccacatttactttgctggatacagcaatctttcgatctgttgattgtatgaaaaaaaaaaaatgaaaggcttttttcatgctaataaactagaaacagtcttaagggagataaaattatgcccagtctctctccgcccttttccctaccccctaccatctctttgtcttcttcactcataggcactctcttgcctgaggtttcctgccccaagcacaggggcggaaggcactttccctgggttcatggggagagagtgccttctcctactctcagctctgggaggttgtggaggcagggccagaactaacagatttgtgagatgattacaaagtaagggcttggttcccagtaactattgttttaatatttgaaaagcccaagagcttaacagattttccttctctttcaacctttaggggatgccaacagacagatcagcgacctcaaatttaaacttgcaaaatctgagcaagagataactgcattagaacaaaatgtacgtgtaagcaacaacgggcagaactgatgattgactggagttttacttgctagaaatagccctgaaaggctgaggaccagaaaaagccgagatttttagaaccaagaaatgtcctaagagggataagttaagacagcaagtctttccatccgtttcttacagagcaagcaggaaggaaagaattcttagaatttaagttgttacagtagatactaatcctttatcaacaacagttagttgtagaaaatagctaatgtggcttgggagtgttttaaaattttgttctttaaaattaatttagttaattggccgagcgcagtggctcacacctgtaatcccagcactttgggaggctgagatgggtggatcactgaaggtcgagagttcgagaccagcctggccaacatagtgaaaccccgtctctactaaaaatacaaaaattagccgggcatggtggcaggcgcctgtaatctcagctactcaggaggctgaagcaggagaatcgcttgaaccagggtggcagaggttgcagtgagccgagatcacgccactgcactccagcctgggcaacagcgagactctgtctcaaaaataaaataaaataaataaataaataatgtagctaattaaaaaaacacatcatactgggacgtccctcttgcctgggcttttagcctttctcttgcagcgaggcccgccctccctggtgtctagacatggggcactcctgcctctagcaccctgggccctagggcaatttgtgttctagccagaaagagagaaaaaaaacaggactgtttccccctccattgtgggtgtacttggctggaactttttagaatgtttatagaaacaaaaatgagaacagcacaggtagagacgatgtgtgcttttgattgcggcagagtgaaggtgtccagcaggccttcgctgctgccgtctttcatctcagaaccttggctggggaatgccatgccgaagccgcctcctttcactcctcgccctgtcctttcctcctcccacccccgccaccccaggagagattagactggagctgaggtcgtggcggaacacgtcccttaccagcaccattctgcctgttccaacagaacagccccacgcagcgggagaagaagcaggcagcaaggtgccagcactgcagaaaccaccctggtggacggggtcagaggaaatgggtccccatcatgtcagcacagggtcgcccagaaatagtaaccaagaatagcttgcttggctcaaacccacaccatagtccaaaatgttataagtatttacatggtgtattctcccattttattaaatcacactctttgatctcaaagtaaagaaactgaagaaagaaaacaggcttatcaatttatacatatggttttttttctaccttttaggtaataaggttagagagtcaagtatcacgttacaaatcagcggctgaaaatgcagaaaaaatagaagatgaacttaaggcagaaaaacggaaactccaaagagaggtaaatttcctaggcaatttctaggaagagaatggctgccagtatttctctagtggggacggtacagagaggatttactactgtgacatctgcccctgggctggtcattgtcagatcatcccacaccactctgcagtgccggtgtcttaataaaggaaggcatggcgcagccagttagggcttagggctagacccttgctggcatcaactagttcatctgtcagttttgagcatctcctataggtcttgtccgtaaacgtcaagagaatgagataaaggagtagccaggcctcttatgctccgaatattttttgtgtcatgcagaatgagcccaggtggaggaccaggagcccatgggcctgctgtggccaagagctgggtgtggcaccagggccaggccacagctgtctcaggtcaccctatggagagtgcccttgagaagccgagctgctgttactccacctgctggtcacactcccaaattaccatgcttgccaattaaaacacatactttaccttactgaagacacttggcaaagttgtttgttcaacaaatatttacagcacccgttgcatgccgggcacgggttcaggtgctggagatgcagctgtgaccttacagacaggagtctccgcctccatagagcctgtgctctggaagagggaggtccataaaagtgaccacaggcaggagaggggctggggtgcggaatggcccaggccagggcagttctaggtaggtggccaaggaagactttccttcttgtggcatataaggacaggcctgaacagcccagggagtgagccaggcagaactgggagaaagccttccgcgcaaaggatcagcacgtgcaggggagctcggggcaaggcactgcctttgtcaaggaacagtcagagcggtggaggccaagtgagcagggggtgagggggtggagggagcagtgagagcacctcagcccgtgaggcagggccctggaggccatggacaggacttgggatcctcctgtgcataaagtgggagctactgcagggttttgagcaaaggagtggcttatgttgatttatgtttcaataggatcactcgggccgggcgcggtggctcacgcctataatcccagcactttgggaggccaaggtgagcaaatcgcttgagctcaggagttcaagaccagtgtgggcaacatagtgaaaacctgtctttacataaagtgcaaaaaaactaattagccgggtgcggtggcccgtgcctgtagtctcagctacttgggaggctgaggcaggaggattgcttgagcctgggaggtgaaagctgctttgacacatgagcgtgccactgcactccagcatggggcgacagagtgagaccgtttttcattaaaaaaaaggaaagaatcactcattttatatttaaactgtaggaaagggactgtggaggagaaaccaaagatgccatttctctcctctttattttatttatttatttattttatttgattttattttatttatttatttttttgagacggagtctgactcttgcccaggctggagtgcaatggcgccatctcggctcactgcaacctccacctcccaggttcaagcctcccacctcagcctctcgagtagccggaaatacaggcacccaccatcatgcctggctaatttttgtgtttttgtagagacggggtttctccatgttggccaggctggtcttgaactcctgacctcaggtgatcctcctgccttggcctcccaaagtgctgggattacaggcatgagccaccatgcctggcccatttaaccttctagcctacttttgctatggtcagagaacatggtccctgttatacctggtctttgaaatttgtcaatacttgcttaatggcctgatacatgattcacttttgtaaatgtctccaatgtggttaagaagaatgtgtagtctctgatttatggatgcaaaattctgtatacttccactgatcaaacttgtgaagtgtgcattcagatctgatttcttttgtctgcttaaattctcagtagctgatagagatttgtcaagctcttccaaaagatgatggtggatttatctcattctccctatttctcctatatatgttgaggctattgatactagatgtttaaaattctgatatcttcttgatgagttaaaccttttatcactttgtagtgacccttttggtccctgctgctgttgaccttgtcgggtattcacgtggccgcatcagctttcttttggttagtgtttgtccacttctgatttttgcatcccttggcttccagtcttccgtgtgttgttatgcgttagatgatctccttcagatgcacatagctaggtggcggtggctcttagttgaatctggaatctgtggatcttaatagagcccttagtccattgttattggtatatttggactcgttttcaccatctgactgtggataaccatttgttctgtcttttgtgtgtcatttttctcttgccaaatttaaattttatattcaatttctattcttttcagtgatcacacatggggtatttttatttaacttaaaaaaaaattaaagttgaacactatctttactcccctcctataaaatagaaggacttttgagcactttagcttcaccctcctgcctggcatgcacaccctcacacatatgtgtatatgtgtatatgtatatgtacacatgtacatccacacataaatacttttgagcttcataaatcccacttatcagataatactattgttgtgttgttgttgctgttgttttatattgcccatgtttgtttgacataactacatattggccattttatatgtctgtcctgctagtgtctcagactgtactagaatcattttcctcctcactgaagtacatactgtagaaattcttttagagcagacttcttggtggtgaattccctgtttttgtttgtacatgttttcgtttcatccttgttcttggacagtagtattcagggacatgcaattctgtgtggtggtcattttcctcaatgattatagcgattatgccaccatctgctggcttccattgagctgttgagaaagttgttgttttaacggtcggtcctttgtagggacctttttttttcttctctagtttctttcaggttctgtttgtctttgattttctacagttttactgttagatgtagtttattggaatctttctgcttgagatatatagtgtttcttggatctgtgaagtctttttaaaaattgattttggaaaatattcaaccattaactccttaaataattcctcttttttagtctctccactttcccctctggaactctaatcagaggatgttagagattctcattgtctccacattttttaaccatctctctttcatgttttctatctccttacctctctctattggataatgcctaaagtttttgcaaagattttccagttcaccattttttttaaaaagtgtcttcattgttgatagtttcttgctgcatgttcatgtatgtcctctttttaaattgtattcttattctttaaatatttcatacacagctgtttggttttctgtatctgacaactgaaacatgctcagtctttgggggtctaattctgtcatttattgcttctgttgactctcactcaaatggtttgtcaccttagtgttttgtgagcttatgcttgattttaatttgtaggaataactccaggcttaacttgtggaaacttcctgcaaaaagggcttgcttctgcctctgctagtgaggtggggtcgggacttctgtcccaggacccaaacaagcttccttgagtgttttgggtcgaaagcagagccatagaccctgttcttgtcacccctccaaaaccacgttctcccagcttagggcaccccactctgccctgctgcctgtgggtccagatgatgccctgctaatgtggcttctgcagctcgtcttctgcctgactctcaggctccatggccctggctcccaggtgtggccgtcttggcctcaggcattcctgccttggactctggctgccagggctgtggggaccaccttcgccatgcagtccaggctcagctcttgttgtttgtgtttgtttacctcatgcctcacttaccttttgtgaaaccatcaggatccccactgggcgtgtggctcacgcctgtaatcccagcactttgggaggccgaggtgggtagatcacctgaggtcaggagttcaagaccagcctgaccaacatggtgaaaccccatctctaataaaatacaaaaaattagccaggtgtggtggtgtgcacctgtagtctcagctactcaggaggctgagacaagagaattgtttgaacccagaaggcggaggttgcagtgagccaagatcacaccgttatactctggcctgggtgacagagcgagactttgtctcaaaaaaaaaaacaaacaaaaaaagaggccgagcgtggtggctcatgcctgtaatcccagcactttgggaggccaaggcggacagatcacgaggtcaggagatcgagaccatcctggccaacatggcaaaaccccgtctctactaaaatacaaaaaattaactgagggtggtggcgcacacctgtagtcccgggaggctgaggcaggggaatcgcttgaacccgtgaggcggagcttgcagtgagccgagatcacgccactgcactccagcctgggcgactgagcgagattccatctcaagaaaaaaaaaagaaaaccatcaggatccccaagggtgttccctctctggagtccagttgtttcagaggaggaagggcatcatgagggaccaggggccaagttatcattttatttttcagtaggattggaatttcggtaacacagaaccctgttatgtttggaggaaacaagttccttaaagctcactgcctttcctccgttcccagctccgctctgcattggataaaacagaagagctcgaggtgagcaacggccacttagtgaagcgtctggaaaaaatgaaagcaaatcggagtgcactcttgtcccagcagtaaattccagctctgatcaggcaactggttggtgactggagagcattgtttcataggcttttctctgtcctatctgggagcgctgcttcttcccctgccttccgagagacgaagaccgtggcgagcttggcgcttaggggctcccgtgccatggctcaccccagggagccccagcagccaccaggtgcctctgtctgcagacccctggcccgggctggcgccgacgctcagaacctgcaggtacttcataagcacacaggggcctcgagggagctctgtgtctgaccgcacagcagcctctgaatgccgctggaagtgatgatcaaagtaaagattcagttgggacttgagttttttttttttttcatgtgtcttgctgaagattaaggggaaatgttacagtgttgggacttcctttcatggcagaatctacaatttgagcgacttcagtagtatctcttagtctacgcttttcatacacaaaacactgtggaaccacaagccattaccaagcaaaactctttcactggaaacaagggggcagtctagaagtaaaagtgaccttaagaagactctttacaggcaacaaatgaagcttttctaagggatttttgcatcagttcagtcataagaatacttttttccagggtaattaggcaatagcttcactgaaaatgacagcttttcattgcattatttaatccttatatttggaattgaagtcgttaacttcttttaaagaatgtactattagaaaaattaaaaatgaaatgttgagagacttcagcaatgtggttctaatttttttccactgagaaagaagatctttaatttcatattaatggttctgtatattttgggtcatctttttattttttaagaatatcaagtcaattcatttttctttccctatttaaaaaaaaaggtgttttcacagaatgagtgcacttaaaaagtgaagtgaaggaggaggtaacagtagagacgatggcaatatcatcaaggacaaaagtaaaaacgtttagctacctgctgatttttagtgactgttcatatatgttgtatttcaagtatggctggtgaagccagtcagcttttcgggacgttagcaagtggaaactgagtcagtatcatccaaaaccatatctagtcttaacacatggagaatgctggagtgagggttgtgagttcagggtatataatcaagaaaacactcccagcataatgctaggggtcaccagtgtccatcccccagaactgtatggatctaggatatacacagctgcgttgcattaagaaagagatgaaatctctattaaaatacacaagatttttgtatctccttgtgcagaggatatttgccactgcccattgggaagcagacaagttatagggggctgggggccaacactggcaagtaggaaaccacgggtcggacaggtgagcaaaatgtgctggcaggtgggcaccactgggagacccacactgcacacccgggcaccgtatgaacaggaaagaggaaggaagctggacgaagcccctcagggaccctgtgctgaccatgctgggcccaccggcaaaagggagatattcagttccttgtctcatccttaaggtttcttccacaacatctgaatacaagcatgtttaactgggaaaatgtctatgtcatgcgtgaataacaccagcagcaaacactcacacatcacgcagacacggccggcagcatgctgacgcttttaggtatttttcactcatgcaattttcacatattttcactcatttcatttgcacggaaattctatgaggtagatgctgttatcaaatccacattacagatgagggacccagggtccaggaaggtgaactggcagaagtctcccagctggtagaacagggctgcaaggcatcgattcccaggtgtctcacagccctgagaagatggcgttttccctatcagtggctctgaggaagtcaagccttcagtctctacctctcccaccaattcttttggaaacagcaaaccaatgttacacacacttcctaatccagaggaagctagaacacgatttttaaatttatttagtaaaataaaactttttttgcagatgtaacgaatggaaattggttgctggcttctttcatccctgcaacctagcgtttctcagcctcagcacgacggtcgtctggagctgggtcgttcttggtggctggggtggctgtcccctgcaccgtgggatgttgagcagcaacactgaactctaccaactcattgccagtagaccccactcccggtcatgacacacaaaaacatcaccagacattgccaaatgtccactgcgggggtgaggggcgtgtaaaagcgcctcccattgagaaccactgctgtaacctgaattagaagatttggaaaagaaatggttgaaaacccagaccaggatccctgttgtatgtttcctatgaatgattttcatttttagaaatgaaataacatctaggacatagagcaaaacactcaaaacacatcataaatggataacataaatagataaaaatccaatgcagttcagaattacaatcaaatgttattttctcttgtgttttagaattcctcattttcatagtcaaaatatcaactaaagcatcaaaagttcctgttgatatttttgaaaatgtgttactacttagcaaatttggatttctggtttgtacagtgctgagcccttgaggaataccagaagaatgcacaccttaaggaggctgtggttttcagggagagaacagccatgcatgaggatggccatagcagaaggcggaggggtggggaagtgccagctgttagctatgtggagccagccagttgcaaattttcaaaccggcagaagcatctgttgtgtttcactaaatgacccgagccagatgtggcccacgtgttcccgagcctgcctgagtatctgaaggggatagagctgatgtccactgacctgcctggctccctgcaccttcagccacatttcggaagcacttgctacccagtgttaaggatgtgcggaggcttagaggattccagctctgtggtcagggccttttgcccttgtgtccaggagcctccagggctagctcccatcactcaaggactggacagttgtccctgaaccccagccctgtacttgctgccatgcccctcgatgctgctgcctaaccacttgctagtgtgtatctccatgtatggccagccccccacccctgccagttcccccttgcttgcttctttcccctctctgccagaatagctctgatcaccacttgtggatggctcctacctggtccccaggtgcactaaatgctaagcaggtcctgagctccactggccctgagtgaagttgcactgtctgtggctggatttgtctcttccaattgtccatcctcttgggtggcatagaaacaagaacatcagagacttgggaagagaactctgagctagaaatatctgttggctgggtgcagtggctcatccctgtaatcccagcacttcgggaggccaaggcggctggatcacgaggtcaggagattgagaccatcctggctaacacggtgaaaccccgtctctactaaaaa

SEQ ID NO: 346 - DNA, 52228 bp, Homo sapiens
  source 1..52228: mol_type = genomic DNA
taaagacatgagccacagatccattgctgacccatgatggagatggacacaagagagaaacacatttttgtcatgttagccactaagattttgatttggaggccatttgctacagcaatataacctagcgtgaacagagagacacagcgatgttccatttcttttcaacctggaacaggagaatttcataggtgggcctcaatttcactttagtatcttatttagacaagaaagttcatactgttcaaatgtcatgtttaagagtgctggcattatcactgctgtggctaccccatcagatgttgctcactgactaatcttctcatgttagtgaggatggacaacatatcaggccataattcaaagtagcaaataggaaaagagcttcatcctagcattatgggaccttaattaatgtcctttcctgacaggtttcagaggcttttgcaggcagcagcagagctattcatctcactgacagtggggaacatggccaaatggttgcccccacaatggaggcagagtttcaggacacttgtctgatctctgcccttgaaggaacagtctcaccctgattgacacttttgcctgttatgtccaaagaaccaatggaaaagcaggaaaattattccttcttcatttctctcttcattatttaaaattattctgtcttcacttctctctccttttctctgcttcctacttagctctttagaaatgcaattataatcttttatctccccttcaccagacactcccaacagggcaagttcatctaactatgtgctcttagttagacgctacagagcagaactctctcccaccaagagactaccttgagacataacagtcaattcacaagccaaaatatgcccgctatgaaactctcccatctggaaattttttggctgcttttacaacctagttttgcccacaaaggcaccagcagtaaccaactcaactgcctggtagacaaggcaccaaagccagtacccagaccctctacctgctcacttcctgccttgcatgccacgccccccatttaaaagcctctgctttctgctccaaaggtgaagcagttacccttaaggaaagaagcctgtacttcttcccctaaggtagctttggaataaaagtcactttataccaaacctagctcttgttaattagactctgcaagtgatgagcaactgaacctacatttcagttataattcctatgcttgctcttcctgccctgccttggggacacgcacacactcccaggcacatacatgcacgtgcactgagacagctatgtgaataaccaacaagatccccttaggaaaaccggtgcttggcctggccttaaattccagacccttgggcatcatacccaagactgcaagaaagaggaggggctggacctgaaaaacttggaagggaaggtccaactgtacaggtattttgtcaggcatgtgatttcagtataaaattctagaaaagatgagtgacactttataaggagagaatatcaacaaaatttctcattttacttcttgctaagacgacagcagggaattgtaagcagatggatgggcaatccccaccttcagcaggggaggccaaggccccaacacacctggggagaagagctgggggcagtgaatggctgaggctttcttggggagctgggccatcttcttcggttttacttcctgaggaattcacaggcttccaggagggctgtgggacacaacagagcaagagattcagaaactgatttcttccattaaaccagttatttaatccaataaatcaaagagaatactaagagttttctctgcccttctcccatcactgagtcagtgcttgccacactcatattcccactcccctactcctagcgactacggtgttcaagggagccagagtctagccctcaccagccagggtgtttccctgctctggcctgagagacacaaccaccctgcacttgtctctgattgaatcgactgtcacattctcaagttcacaagacattggtggtcctctagcttctcccggaatgtgaacctgtttgcaatcatgttcacctgcagattcactcattcattcacagatccttactgagcacctgctttgtgtgagttgctgtgctaagtgctggggacacagcatggatagactggcctgccctcaagaagcatgtggtctatgcagtcctgagctggctgctcacaagaagagccctgtagccatatttctcagagggtggtcctgacctgcatcacagtgacctgagttgtttgtcaatacagaaaagggtttctcaaccttggcactattgacatttggggcctgataataaccctttattgcagggggctggctgtgctttgtttagtagcatccctggcctctacctatttgttaccagcagcaccctctatgttgtaagaatcaaaaaaatgcttctcacattgtcaaatatcccctcaggggaaaaattgtctctcattgaaaactaccgataaagacatttctggccctgcccccatccttggaccaacagcatccctaatgcccccaactctgggtgagggaccaggaataggaatctgaatgattgcagtgcacagggagctgtgcacactgaaatcccacagttatcaccgggagccttacaatactctgtgatgtcttctaaatatttttaagggattaaattaatatcaacatatttccctggttaagatgtgttttcctacacttgaatttttttgagattttgttttctctatagttggcatctatggtaactgtctagaatcagattttttttttttttttttgaggaagggtctttcggtgtcacctaggctgtagtgcagtggtacaatcatagctcactgcagcttcaaccttctgggatcaagcaatcctcctatttcagcctctcaagtagctgggactagaggtgcttgacaccacaccaggctaatttttaaaattatttttgtagaacaaggtctctctgtgttggccacattggtctcaaactcccgggctcaagccatcctcccacctctgcttcccaaggtggtgggatgacaggtgtgagccatcacacgtggctggttttgtcatttctcaatgcatatgtatatatgcacctttcattttactgaataaaatggattatcagtttccaaagatttcatgacagtgccatcactatccgtactataaaatttataaaaatttattacatactgctctattttattctctaattattttatcaatgagattataatttcctgaactgtaaagagatattatctttccttaacatttttacacctgtgttcgttcctagaatgctgtttggccctcaaaccttgaccttcacccatggtggtttctcggggatgctagctagggtctacttacgggaggttgagcactttttcagattagtaatgcctgcgacatactgtggtcccaaatatttttcatatgttgttttgccatggagtctggccagacactcagtgttgtcattgaacagaaggtttttggtttcagactggaataagcaaaacttgtccgggcagtcagatccatttctcccaaatttagcctgcgacaaaagggcagacagtgagtagctaaggaaaagaggaatttatgggttaaaggaggcaaaggggtatttcttccacccaagaacagccctgagaaaaccatggggcagaaggagctgagttctggagtcattccacctccttagtggagtcccccaccccacactcctggtggcaggcccgccttgggcagcatccaggcctcgcaccacttctggtcctacctcctaccatctgccatctttccttccttcttaacctgtgaccttttcccatacaacttcttatgggtgacaaggcaacaatggaggggttttgagatctgccctcacaagtcaattgctcaggacattctaatatgcagctcttctagagaggcaggctgctaggaaaacccaggctcagccactaaccagctcagtgtgcaggtcggtcaccctgcctccctcacacagttcctgctctgtcccaggctcccatgtggggagactgagacccaaacccctcagtcacggcagctctctcaccagcaccactgtgtgtgcacattaagagctccataaaggccagttatggtggccagtcttgttattcctgagttgttttcttcaaaagcacacagagacatgatgttatatgataaaaatagaagttctaataaaatcccagattttaagaaaattttgggatttcgttcaaatcacatttagagagccctaaatctatagggcaccttctgagtttgctgttttagaggcctggcctagagcactgttcactcggcccaggttcaggaaatgtcacctgagtaaaaagcactatactaatgcatgtgggaggaaggctcagtggcttcctcatttgccagaagaacagcaggagggaaaaagacagcctctgagccaggcagtgatggcaacaaggccagggcacagagtctcagcagaaatggagtgagtcccagaaagcccagagtcaaaagcctctgttgttcttgttgacactctgggcaacgccacagcatgaagccaatactctcaccatgagcttcaagtagaggactagagaggatcgagtgggctggtgcacctagctctgtgatctcctcacctaacatgagcccacacagctaagaaagcactagaagccctgtggtccatacctgttggtggagcaacacctgtttcaggcgttccaccttatccatccgagacaccacggcatgattcggggccatggcaagatggcagcttctagcctcagtcacaggcttccgtttgccatcgaggcacagcagcgcaaagtctgccagcttcaaatccttagcccatgcctcattgttatttcctggggagaaaaagaaggtggcatcatccacgcctcccctgcttagccaagaagtctcttctgggtgggtgtggccattccactgacctcccaaatgcacacactggggttgtggtgatgtgaggaacagagaaggagcttcatcctacacaagctgtacaaacttcaaatataccaaatattagtgctgtgtccatgcaatggaatgttattcagcaataaaagggagtgaagttctggtacatcctgcaatatgcatgaacctcgaaaacgatgctaagtgaaagaagccagtcacaaaagaccacacaataggctgggcacggtggctcatgcctgtaatcccagccctttggaggccaaggtgggagaatcacttgaagctaggagttcatgaccagcttgggcaacatagcaagacctcatctcaaaaaaaaaaacccaccacatattatatgactccatttatatgaaatgtccagaataggccaacctatggagacagaaagtggattgatggttgccaatgctgaagaaggatagggcaatgactgataataggtgcaagggtttctttatgggaggatacaagcgttctagagttggattgtgttgatggctgcacaactctgtgaatgtgctggagatcactgaattgtacactttgcatgggtggattttttagtatatgaattctacctcaataaagctgtttagagttcttatttttttaaagaagaaaaccctccacctatgccatatttttcagtgagttccagaaaaagaatagatggtttacattcaaggagaaattggtttctcctccctttcatattcaaatgctattagtgtaaccagagaaaggaaaggaacttttataggtttatcaaatatatacagccaattctaacaaaatacagttgtaaagtaccggagaaagttaaaattaaatttgacatcaatctgatccctggagattacttcagttaatggcttgtaaattctaaatgtaattgtatgcatgtctatgtttgtgcagatgccggctcattgttccggctcccgtttgtctctctgctctctccctttaagaaagcactttattcattctcttggattcctctatttgatattgaaataatttcaaatttacatgtcttgttttaatctctgtcccaagagacactagaaggagcagaagcagaagggagaagtggctgagactgcagtgattactgaaggagggaggccgaaagtggagacagttctttctcaggaaacagaatagcaagtcacctgctgagacttgggggttggaatgctgaagtggggctaaggagacagatgcagattggaaggtagcaaatggctgaggaccaggagagagagtgattgttcaaacattggctggaagattatcttccatcatctgcaaccacctgtaattttgttcccactaactcccaaggagtctccagaccaaggctcacatggggatgaatgaaggcctctacttcctttttcataaagggaggcttcatttgcatatgttcacccagtttgtagcatcatccacagtttccaataggcatgcatgatctcatgtgggcagacagtgtgtttctgtggttgactagaggaagccagggagacatttgctactgagcatggctagtatctgtgtgtgtgagagtgagtgtgtgtgtgtgtgtgagagaaagagagagagtgtgtgtgtatgaatttcgtttcaaaatccatatgacacctacagatgttatcatgttgtctattgagataaagaattttggagttcttttaatcacaaatatggaaaatgttataaaaccttcccaaaggcaaatctgaacactaagatgtgttgtgatgccaaagactctgctttgaaggagaaaaggaaacaccttcacctaccatcagtgttctgcaagacagtgacatctttcacaaatgcaacgtctccagcattctcagccaggcacctaaaatgttccagaaaatatacacataattacagaagagaaactagtggggctttcataaatatttgtaatatgcattccaaaaactgaaatatggaagtaaacatctaaaagacaactatttctaggaatttactgtttacagcggcagattgaacacaggtgtacctgccctccttttaaaaccctatataaaagacattacaaaaccaagaaatctaaagatatgcgacccaggaaacaggcaatctaacatgaagtaagacaaaggaaagcaccaaaataatggtcaacaggacccccaggaccacagatgtgcaggcggcctacacagcaaccagtccaaactgcagcaggaagatggatgccttctggagcagcacttccaagtaaatgatgaaactgtgatagcacccagagagagagagagagagagagagagagagagagagtgtgtgtgtgtgtgtgtgtgtgtgtgtgtgtgtgtgtgtgtgtgtgtgtgtgtatgcatgttgttaggagatttacattactggcagacagtttggggatgagatagtgatgtgtttttttaagtgcagaaaattaagcaaataagaaaagacatttatgaactccagagtaaacaaaaagtttgtacaataagggaaatataatatgagaataacgcttacacagtcataagtactgaatatgacattagcgtgttgggtgctgaagagagttgaagtctgtggttgtgtggtggaaaaggtgctgggggcagtgtgagaggctagatcttcttctatactacagagtcagcagaaagttaaaaattaagaaccagcattataaggatgatagaaataaaggggtatgacactggtttcagcttttaatgattttgctataaatttccccaatctagattctagatataatttaaacaaaagacaagggattttcttccagtataattaggaatattaaaatgtgggtgtttccagtgaactaataccttgctgcaggtctgaaaaaaaaaaaaagaggagcacatgcttctttcgggctcttatgagacatgtgttcagcatttctgagtagaatcacatttccatttgcaaatccttagtcccttaaagatatttttatacattcacaaaacatttttttttgttttgggtctttttttatgagccacttatatagcaaaagctacttttctgtcattccattactggaacaaggctgttgaatttatattaaaaagttcagacaccctcagacacatgacgccatctggtcgtgaaatgtactcttggcaaatggaggaaaaggaacaggggaagatcctctctgcacccttcacactggtaaatagtgcccctgagaagcaacacccggatgaatggtgctgtaaaacgtggggtgtggttacaagtcactaagtggttataacttatgaattctgaaaacttgttttttggcttatttttcacttcgttactggagaataacactgcaattctgccatctctttgccatttctaaggccaaagtcagagaaaaagggaaacctaagccatagtcatgacctaggtgagaagaaaaggggcggcgatgggaaagagaattcttccccataaatggaattgtaggaagcacttaggataccacactctacccatttgattttcaggacgaggctattgaggcctactgctgttgatcttggctcaaagccacagggagaagcactgcggagctgaggtcagacagccctggtgccagcctccactctctggggcggtgggtgtggtggggacagccctcactggggccacccatgagctgacccacaggatgacccccactctgctgtgacaggtcacatctggctccttagaactgcaatgctgacatgctgagggatgaggtaagtccccatcctgatggagctcagtcacagactcaccggaaagccccagtgtagccgtagtatctctcgttgctgttgggcacgcacttattctcaccctgctcgtcgccaatacacagagcacagagattagatctcgggtcagacccaggggcacagctttgactgaaatattcatctggagagaaggaacacggggagtcagctcttcaaacctgagtccacacaagcaacctttacctaacagccgatgcagggtggtttcagttcattagacttcccaggacagcaatctagatagaacacactcaccatcacaaagcaacatgttgtcaccaacataggacccaccagaaaagcttcattcagactgtaggcacagatggacacccaactaaggctggggatgagagctgtggctgcctggagggtcccgtcatcacagccttgagctggggactcagctcatgaccgtgatggctgtgtgcagcagagcctgtgagttgcctagtccaggatctgattttgtttttatcagtaatggaaaccctgctttgtatctgggtgcttggccctttggtataaagactagacttatcagactccctggggctcatatggccatatgggtagctataggccagtgaaatatcagcaggagtgttgggcgccagcttctcagaaacatccttgaaagacaattggtacatgccttttgccctttcttctccttctctttcttcatcctgcacatagaatgcagaagcagggactggacttagagatgcaatgtgggccatgaggtgaccttgagcatgaaagccacacaaatggcagagtagccaaatgattaaagcccaggttccagaccccatattgtcttcataccagccctaggcaaaccacctctggactacatgacacagaaattaacttctgtcttgtttaagcctctactatttcaggagttttctgttccttgcagctgaacctgatctgaattcgttcattgtgtgatttaacccaagaaagaataaacaaaggtgacaagaaagctctgccccactgagcaaacgtcacccattatcagactcccactgctgctggaagagccacactatgtgtcaacctcaggaaaagctgggagttcccattccatcctggcagtttccctacagctcagaggctgccatggagctggtgaggagcagagccacgtgaaagctgcctgccccggccaggatcaaaaacccatgcagtggagcccctgccctaggagacgcccatacaagaagggagtcacattgaggatgtgctacacaccatgccacggggcccacagcaggcagggtgtggctgatgctgactaggatgagtgtggggtgtggtggggagagaaaactgcagaagcaggtggagccaggctcttgaggtcttattcaggctccgttgcagtgtagagtaagcgtcagttttgcttagtaacaggagtcacctttcatgaggcaggcagacatctttccccaagctgggaagccagagtttaagaggaatttaggtctggagctccaagaggtaaaaagcatttgcacatcttggaacttgcatttattcttagggtgcagcgaaataggcagatattccaatctttaatcttggggtggggtgaatggggcatgggaagtgctgtgcagggaaacccccagtgcacccacgcctccagggggcagccacagggagaatttccttatgctggaagaggcctgcaggccactatcagcctgcaaatcccctcccctcccttccctaaggttccacagcacaatatgcctaccctccagggtggcccacccaccgcacctttggaactccttaccaaatttgcaggagcccgtctggttgaagagcaggcccatggggatattccagcctgcagtcctgtccacggcggtgtggcaggacttcttgcctttcacagagttccaggtaaggctagtgtctgatctcctaaccaccgccacagcaagatatcctggcataacagatgacagaaaaacaagtcttaacctccaggaggcctggcacatggattccagtggagctgtctacagcccaggccaaaacaggccaagaagcaacaccaggcaatgattccctcaaagaactggcctttttaggtagaccgagaaagcataagctgctgccttatgttaaggtgagattgatgaaataaaacagtaagaaaagctgattattttagtgattacaggggactgtcttcaaccagccacacaatgtccctgagttacaaaccagcaatgcatctctcagtgtaagcttctacagcaacaaacactataaacaacaagagagaccccaacagtgcataaatcaccaaccacagtgtgcatcaggcaagagcaccaacatccagccagctaacggctgtgtgggtacaggggcacatgtccccagggactgccctgagctgagtctgaacccaccctgcactggttgaactcaacatggttgccgttgtcctcctgagagaatgcatctgacagacacccaccaagggcaagtcttttctgaaactgagcaagcaccagctctggtgggcaggaggagtggtgcacagagcactgggacacgagtcccaggtcacgaggacccggggtcaagaccaggatctaccacagtattacctatggctgtgagtgagatcctgggcacttggggactctcggtgccactgtttcctcatccccatgaggtggggaagtagcaccccccattccatgaccatgacaaaatgagggactatatggatgttctttgccaagtgtgaaggtcaatataaacattaattagaactattcctctgtgaattatttgcacccttaaaattattgctcctagaagccctatagcttctagggctgcaattctttctgttttttttacagttcctgccacttcctcttccagcaacaagaacttatccttgaccctgaaagtggctaatgccaactcaccttccacaggtctatccacacagttaggatcagggtcactgctttgttgggattctgaaagaataaagacaagccagacatcattatccattcagatgtagtgagaagccacaaactcttaaatctcaatgatgcagaatcaaatccaaagagaccgtcccagcagttccatgcaggagaaatgcgtctatatgttcaacaaaagacatggcacagagattcacagctgcattattcaccacagccaccaactggaaactactcaaatgcccatccacactcaaatgatgaataatcacagtagactcacacagcgacgagactgaacagtctacaactacacacttaggtggatgaaaagcataacgatgagcaagagaaaccagacataaaaaaacacatgctgtgtaattcctttaacatgaagtttaaaacataggcaaacttagatctgcgaccttagaagccaggagagaggcttcccttgcaggagtaagggggcgggggacaggaggacataaggggcttctgaaacttgcagtgtttgttctgggcccgagagcatggactgtacagtgtgtgaagtgccatgagttgtacatttatgtgcacttttctgtttgtatgttataattcactgagatcttctggaaaattaagaagataaaaccaacctgtcccttgttaattctcaacacaataggctttgtgggtaacacggcccctttcatttcttctttccctgattctcccttttgaatgtatctgttcatcataatgtttcacctgcattcaccgaatgggattactcatagccccactcccatgacccagagggaatataccagaggatgctaactccacttactgtagttctctgccaggacaggcaccaaaccacatttgcctgcagtgtacacatatcctccatccaaactcatggcatcagcttctcctttctgcaaagacagagcagatctccagcaccacagtgaggctgcatcccgtcctgcctgtctatatagctctctgagagaatggttttctgtcaggtgaccagtgaaacagcagaaagagatggactattcaaactgagcagccagaggaaacaccgtgtgcaccactaattctctcccagccctgcctactttctgggctgtcaattcaactggaaagaccaggcacaggttgcactaatcctctgtcctctgagcaaaaccttttctgtgtccctggcactttggggacaccttcctggagcagtctcactgactgaggacacagatgggaacagctggcctcatctaatctgaactcattagcactccactccaagcgctacacagaagttgtccaacacataagctgaagtcgtcatattggcccaccaccagaatgaacaagtccaggctacaacacaggatcatggactcatcagtagtatgaaacttcctctttgacccagtaatatttttacaactatattaaaaatagagaagtggacaaagatttctactcaagaatgctcaccacagggttattgataatagcaaagtaagggacaaagaggaatgggggcatgactaaactgagccatattcacataaaagatatcctggaagcatgtttaaaaaatgttttcgtccgagtgctgtggctcacacccgtaatcccagcactttgggaggccgaagcaggaagattgcttgagcccaggagttcgagacgagcctgggcaacaaagcgagaccctgtcgctacaataataataataataattatgcaggtgtggtggcgtatgcctgtagccccagctacttgggaagctgagatgggaggatcacttgagcccaagagttccaggctgcagtgagatgtggtcgcaccactgcactccagcctgggtgacagatcaagaatctgtctcttaaaaaaaaaaaaattaatgctttccaagagtaaatattcatgtggaagaatgcccattatacgctgtttagtgaaaagggcttaaaaacgacatactgcaacacttcattattgttgcatgcatatctgcagatgtgcagagaaatactggaatggagaattagccagactttaaccatgtctgtccctctgtgtgagatcacaggtggtttggggggtttgttgttgttttgttttaacataatacctttccatattttccaaattccttataataatcctgagttgttcttataaccagaggagtgggaaacccacagtaaactgctttttgaaactaaaatgctttctggccctgagcacacctctccaggcatccctgcctcacccaggcccccgtggcctctttgactgttgacttcactttaagcagatgcccaggccctaggtcttccaccgggcccaccgcccgcccctgtgatggagctccctaccagcaccagggcgatgcagtcctctgtggtggaggccgaggagcaggtcacgctgccttcgctcaagccactccactggttacacttgcgcagctcctgctcgcccaccgcacaccacacgacccgcgcacgccgggcagccacttcctcctcacctgccagagggaagaccgcaggtggctgggcaacctgagctttgccaggttgtccaacctccccagagccagggtcctgcccagactctccctggaacaggagctacagtacatgtgtggacatgtggacccataccctctcctcctccacttctcagctccaagccccttcttcaggtccacagagctccctgtgtttcccacttctgttcctttggagaagttcctggcttctaatctatccattaatctttagagtcaggaggcgcctattgtctctgtctctgaggataaacgctccatgacccagagaccagtgacagtcccaagagatggcctaggggaccttgagcccaaccctgacttcccctaacgcctgcaatcaccaccaataactacggtgcagcctctgggttcccccagactcccacccccagccccccagtagagaaggagccatagctgagttcccccaccatggtgtccccaactaagttcaaggtctgggcctgggaagtgtgggtaaatccaggcccccggattcatccaggaggggtcctggctatctttgttcatgttcatgtttctcacttaataggaggcaaactgatttttctgccaggcctggggagcctgacgtgcactgatcaggtggccagactattcttttagagacacctgacctaatccacagaagacactcacacctgcatcaaacctccacgatgaccccacagtgtctgggaaaaggagtgaccgccacaaagtagggccacctgctgggaagtagaagaccacaccaggcggacctcaggaccctcctgggctcactcacttttcctcaagttctggatggcagtgaagtagccggagccaaggtacagcccagaatctatcctcgggggcaccctcgaaaacccaatggcagagtccttgaacagcagatctttctgcccactaggggagccaaagagctggaatttcggtgacttgtcctttccaaacttttcctaattaagaaaaaatagaattatggtgtcaatggtaaatagggaggaaacaaaaaaatgatgttaaaaaagagtatctggagctttgggatcattctaactgagagcaggagcctcggttgagaccctcctgcagagggacttgtgccatctcggagacccaagctcagctatggctcattctttgaagagttgctgaggtccaagcaccttagggccctgagaagattgcatcgaccaccccctgcttctgctcccatcataagacgctgtcagcccgtgtgacagaagagtttcattgcttctgctgtccacagtacagcctgggcaagcagcccaatgcattagtgtgctatcctgcagcaaagctacaggacttctggagtggcagaagtcagggaagtaagaaaccttgctccctgccccccatatccaagcaagtggggaggaccgtgggtgaagatacctgtgcctggcggagaagattccagatggcatcctccttgccattcacacttcgtgccacaacggcatgagaagggacccgggccagatggcagtctttgaacttgtccactggcttccgagtgttgtctgggcagagtaactcatactcgtccctttcagcctcgtctgacaggtcctctgcagggaaggtgaggtgggagggagtctagataagccgactccagcagtaacctcgagctatagttccccttctccctatagaattttgagcttggggagatagctgacaaaactgagggtcagaaaggcaggggtttgctccagaacactcagaaaggtaaaggtagtgccccaaaagcctcagggggcagccgaggtgtgatcctcatcctaaatcacttaggccaccctggggttcccgtgcagctgctgcctggcaggccagagaggccaaaccagacccgtctgtttctgcggcatctctgcctggaaaagtcactttgcagagacaagctcagggggccaccaagggttgctcccttactcacatctctgggaagaataaaaatgacaaaaatgttaacaaggcagggaataaggcaggaaggtgagacactttccaacactgagtatatcaaaagaaggggaagaatggttttatgaatgagttcaggcaaatgtggaatatcatatataagttgcttcagaatgtgtaaagtgaaaaaaatcttgcccgagtcattttatgagattagtacaaccttgatgtcaaaatcagaaaaagtataggagggaagaattaaaagtttattttacttacgaacataaatgcaaaatttgtaaataacgtactaactaactcaatctcacagagtatttaaaaagctaatagattggaatgaaggtttaccagtgtattccattaacaaaagaatggctgaacatcaaaaaaactaaagtaatctgcatttaatggcagaaaaccatgagatcgtcttcatcttaatagatgcagaacgattgtttatgtgttcaacatctatttgtgtgtggtttttttttcagcctcagaaaaatagtaatagatagaatcggtaaagtttttttgtttgttttgagacggagtctcactctgttgcccagcctggaatgcagtggtgcgatctcagctcactgcatcctccatctcctggagtcaagagattctcttgcctcagcctcccaagtagctgggaccacaagcgcacgccaccaggcccagctaatttttgtatttttaatagagatggggtttcaccatgttggccaggctggtctcgaactcctgacctcatgtgatccacccgcctcagtctcccaaagtgctgggattacaggggtgagacaccacgcctggccataagttattggcttgataaatgccattaatctacagcaaaaaccttactaaaagaagaaaatgtagacattcaccgcaaaatcaggaacaaggcaaggatgcccactgttacaatgccagcacaattctagatatccagatcacacaatttacaaaagaaatgtgagatataaacactggaaggaaaaagacacactcttatttaaaaagatgatatcgtcatctacaaaaaaccaatgaaaccaacagaaactaataaaactactcagaggagtaacaagttataagagcaacctacaaaaatcagatgttatcctcattaacaataaccaaatagaaaccaatatggactataagatgttacaatagcaactaaaaccattaagtagctaataattagcctcccacaaagacacatcagacccacaaaggaaaaattttagttctatcaaagaaactaaaaagaggtgtgatcaaatgggggagatttagcatcaccatggactggacaacttaatgttataaatatgctgatttttcatggaacaatttaaattcagtacaattcgaatcaaaattaaagtatgattttttccagaaattcaacaaaataattctgaagttttagctgagtatatttgaaaaggaataataaagtgagaggggagagggagctctctctcattctctctctcttcctctcactggctctctctctttctctccaccagatagtaagacccattggtaagccacagtaacaaaagcagaaaaaatgcaaatacaccaatgaaataaaatagctcagaaactggtccacttggatatatacaaacttggtgtagaattggcttcacatatggcagaaaaaatatactttttttattgtaaggtaaattgcctcactgtaaaggggataaaatgctaaagccaaatctatatctgactttctaggtagagcacatataaatagatgaggaaggggatcttcaaatcttattttaggaaataattatgatttgggtgtgaagaagggcatctttgaaatatctcaaaactacaaaccaacaaggtgaggcttgtggatttgaccttatcaatatcaaggatttttgatcaacagagactaccgttgtcagatttttgactgagaagaggttttactaaagtttaaaatcagcaatagtttgatacctagatagaaggaacttctgtccttgaatcaaaatcatgcagaaacaaggtgtgaaactcaatttaaaaagtagtcaaatgtcacaaaataagaaagggaagcccaaacggctagcaaatatgttgaaatgatcaaactcaccagctgtcagagaaatgaaaattaaaaataaaacgaactatctattgcattacaaccatcattcggacaaaaagtatgaaagtcaaaaatacttctaactgaagttgtggggaaattagaacacttgcagagtgtcattccagacagcagcttggtgatcctgggtgcatgtggggtctgtctctggtggccctgggtgcatgtggaggtctgtttctggtggcctctgatgaatgcggggtctgtctctgatggtcctaggtgaatgtgggtgttgtctctttctctggtggtcctgggtggatgtggggtgtgtctctgatggtcctgagtgaatgtgggtgtctgtcactttctctagtggccctgggtggaatatagtagccctgtctctattggtcttgcatgaaatgtagtgagcttatgtccactagtcctgggtgcagtgtgtttagcctctacatactcatcaactgctttattataagtccaggagggacgctgtccagcacgtaagtaaggaacacaggtgaaggtatcagtcgtgtggctgcatgtggtagaggaaaagagagcacaacctctgtccatcactatggtgacagagaagtaaaaggtggatgtattccacggaacactcctcaactgttaggacccctgagctagacatgtatacaacaataccgataaacctctaaaacaaaatgctgagcagaaaacccaagtagcaggatttctaatgctcactaaaacctctatgaacccagaaaccggaaacacaaaccagcacaatctgttctgcatgagcacatgtgtcttggaggactggaggacgcattgccaagcacctaggcatgggtgtctatgaggggaagagaaaggcagtaggcacaggaggtttgaagaaaactgatcatttaaaatatgaaagatcataaaatcagagctgtgccctgtaggaatcttgaaaatggtctgccatgaacttaggaatctaattagctcaaaggtcagagtcatgatcaagtaagataaaaggggtcagtacccacggctcattaccctgctcttaccaaacactgtgctctctctgataaaagccacgtctccagccccgtctctcagacacctgtgaaaagagaaaccatcaggggtaagcacaggcagccctccccagcccctccctgtggaacagtagccctggcactcagcatctatgggtttctactccctgcagggcagggctctgaagctttggggcatcccagctgggaaggtaggggccccctccaggtagatactgaagaatgactcaggtgctagccagaggcccccatcttctgctttgagggctaagaggacaaaacttttttctatataaaggagagttttgaagcctctacccaagagggtaaagccttagcatcactgttcatgtggctgttttcctcaggactgagtgtgcaggtgtgccctggccagtggggaagtgtggaggcctccctctgcaaaaatacgctagtgccagcagacagaatgggaaaagggggagctcagcctccgcgtgggggcagagaggatgggggcgaatcaggcattgctcactgtccttcagccacggggagaggcccaggtgggcagaaggacatcagcctggacactgcagcggtcctgcccaaccaggagccaggactggacatctcatgacaagatgccttcagtcctgctgtggttaggcaggcggcagaaattagtatgaggaacccaggacaacagggcagccaagttggattcagggctctctgaggtaacaggagggcccacagccacagtgactgcccgtggggctggtgagaagttgggggcacagttgggcccggaaggctggaggggaacacacactgggcaggcctgcactctctttggacacacagcagtaggagaacagacctcctctcgtccccaagagcaggctgggctctatgtggggccagagaaaaggcctcccggcctgaggccaagggacacttggccactgacgagaaggggacagggtcactcacttgaaggcaccagagtagctgaagtacggttcctgggaggagaaggcacatttgttttcccctgtccccgcacacaggcgacacaggttggggaactgtcctttatctgcaccgggaacacagctggctgagaagaacctggccacagctgttaaacacagagaagtggaccacagagtgtgagccagccctggtcacagcaggttacacctcccatcctgaggtctccgtgggcaaggccccttcctccacccctgcaggagagactctgtcatggggctgggagctcgagacatgcacctctgccgagagcagactcagctgtgcctcccaagggctgctagggtaacggatcctgccagcaggatgttacaagctggccagcctcacccccaccttgattcatcccacactttcacctgcatgatctgtgtggcctgtgcttacaactggaatagagccccctgcctgaggccactcactatcccccagccatcttacctgcctcaatgggctcaggtggacccgtccaattcaagaatggacgaagtgtccctatagggacattccatccagcggtcctgcgaaggcctgtgtggcaggacttcagaccttgcagttcgttcagctgaaagctgccgcccttcttcaccacagccacggcataatagtgagttcgtggctctgcaaaggggcagacagaattgaaagttcttagcctggacaagagggacaaaaacaacccatcctgaaaagtctccggtgggaagggggaatgctgtgctgcagtttcctcacagctcacgtgtgtcctcctctcgtgggtcagcgtcaggaggaacggccttcatctggcccagagcccagcgactccattccctacatgtgtgatgtgacccagactccacctccacatgttcccccagtcttaatccacacagctcagggcacaggctgaggccaccgtggcctctgggtccccaggcagaactcacgtctttcggtcccgtagacttccgccgctacaggtcgcagtttgtagggggccaggcctgcctcgtatatgaaaccaccatcaagggtcacagcatcggccctgttttcctgaaagtaaagaggccagactggcttcagcagaaaactcacccaaacccagcaagtgggacttcaggacctcaaaaagtctccatggctggaagggtcgtcaaaggggtccgctttccatcctgtcccctcacttcctatgagagatggtgagagccaaggacccctgttttgggacagtgagcaccagccctctaagtcctgagactggcgcctgccctctttctcctctgcctgcctgtgtcactctcccgatcacacccctcacagtcatctatatttgaagtcgtttgttctagatactttctatttttgctctatattcatttcttttaagttctgttttattggatagaaaatatagttattaagctatcctaaaattttcataagaaaccatgttcctccgcttcagcacattgcttcccacatgattacatatttctttggtttgcaatgtgggatagtttagtggtccccaacttttttgccaccaaggaccagtttcagggaatgtaatttttccacagacagatggggaatggttttgggatgaaaccgttccacctctgatcatcaggcattggattctcatagggagtgcaacctagatccctcgcatgcacagttcacactagggttcacactcctatgagaatctaatgccgccgctgatctgacaggaggtggagctcaggcagtcatgctcactggccctctgctcacctcctggtctgaggtctagttcctaacaggccatcaaccggtaccagtccgtggccaggtggtggggacccctgggatacatcatattttgtggactgcttattcctctaaaactggatacattttctaacttctgcagagcctttactgattttgtagacagcataatgttttctcataatgtgggtgttctatcgtgtattgaataatttcccccaatgtttagcatttaagtttatttctaactgtttcctgtgaagactgtattttcatgaatatctttgtcctcagtgtttttccttgtgaccacttgtgtccttgggtaggcagctgagggtggaatcccccagatgaggagcacgtttccccctgtgacccgggctgccgttgccattctgcttccagaagacttataataccaattcagaatggcgctgaccgtgaggaccagcttcactcttgaatcaccagcagggcaggctatcattctattagctgttattactatagaaaatgtgagtactaacaaatcgctcaggtctgattagtaaggggaacatctcacaagtattttttattaattatgaattccctcttactggtaactctgttcatatcatttttcttctatgattctacattttttccaatttgggttattcttttatttatttattttttcgagcggagtcacccaggctggagtgcagtggtaccatctcagctcactgcaacctccacctcccgggttaaagcgattctcttgcctcagcctcctgagtagctgggactacaggcgtgtgccaccatgcctggctaatttttttttttttgtatgtttagtagagatggggtttcaccatcttagccaggatggtcttgatctcctgacctcgtgatccacctgccttgacctcccaaagtgctgggattacagatgtgagccaccacgcccggccttgagttattcttttatagagtgtaaatagtaatcatgtgtcagagctggcgcatattcattcattccagtcctttctaatttttttatttaaatattttctatgggctatgaattacattttctgtattttagaatatctgtttgtttcgtgatttagatcatcatttaagagatttctatttcctctacagttctgctagttaacctgccccctagtttttcaataatacaagttttatttttaaccatttaatctatctcaactttatttgaatgaatggtatgtagtactgatttcaaacagggatcttattttccgagatcagacgagatcagacgcgttcagcgtggtatggccttggacaggatcttattttaaaaggcagattttgtggcttctttcacatatattcagattgagtaggttagaatagagcctaggaatctgcattttaaacaagcaagagatgctggtgctggttttttgtttttgttttttgttttttgagatggagtctcgctcttgtcgcccaggctggagtgcaatagcatgatcttggctcactgcaacctccccctcccgggttcaagtgattctcctgcctcagccttgtaagtagctgggaatacaggcatgtgccaccacacccagctaatttttgtatttttagtagaggcagggtttcaccatgttggccatcctggttttgaactactgacctcaggtgatcctcccacctcggcctccaaagtgctgaaattacgggcgtgagccaccgcgcccagccactggtactgtttgtatgcaggtaatagttgtaaaataatagcctaaaacattgattaaactagatttttccctaagtgctattctaataactccattgtatttataagataatcctatgaagttgcctcgggaacttttatgcaaattattcactctgctggagttgagtacacatgattatggcacatggcaggtacacagaatatatttgttgaatgaatgagtaaaaatcatttcagtagatcttacatctcaaaaaataaaaggaatcagaaatcatatacaagtcatgatacccttttctctctctctgaaagtgtcttggacaaaagtctttctaacacccagcaccctggcaggccctgccccagccatgtgatgtggcaacggtgaccaggacaagcttctttctcacagggtttagaggtcatgactcttttggaggatttccctctctgagtaactttgctttttgctgatcctatgtattcatcaaatacaactgattacatttcattttggaacagttgttattaatgaataacagttgttattatagtttatgtggaggctccaggttcctcacacatggtctcttgacttaagctccttcctttctgctctgaaaatagcacagttccctgtgagagaggacggctccccacttcgttgcccaacaggtgaagcagaggaagtaaggagagctcgtgttctatctttttccatttctctctcccttccattcagcttggtcccaaccaacacccggcattgactcaccgcaatggcctggatacactggatgggggagtctctctttatgcagctgacaggagggccacgcacttttctcatattcctttgccattggaagcattttgtggcctcgggttgggatacggcgcaccactgaacactcctcctacggccagccagacacagtcctgggagagaggggccaaggagtaaggattcaaccactgactgagggcgtgaccaccgcaccctctgatggagttttccagactcctccctctctctcggctgccctccttccctctccatttcatggctatgtccagccattctccacaagtggaggcatcttgctggactaataggatctctgcattggctagaggtctgtggttctcaataaattaaaggagaaagtccctctagattattttcattcctatgactttgacatgtttcctaccacttaaaaaatgatggtgatcccccagatcagttatggaattcttctaccagctttgcccactttgaacctggaaggtaggcaggaaaggagtcattgctcctgttttactgatgtggaaattggctcctaaggaggctgagtgactcgccactcagcagtgcagagcccagctgagaatccacgtctctctagattgttttgtgcataaatctcttcccagggaatgccaagagaacaggggaaaatatacctgagtcggttggtagctgaggtaaatggtaagtcagtgtcaatggggacaaatcagttggttggtgtgcctgagctaccaccattcactctgcacagaaagactggtgctcctgttgagcctgctttttttgctcaaatactggttcttcttttgagcctgcttttgttgctcaaatccatgtaattagggaggaagatgcattgaatttactcacctggttgcctgataaaaggcatccacaaaaaacctgcaatgaacatcatactaaaatggtgaaagactgactgctttccacctaagatcaggaatgatgagagagtgtccacactcaactcttctattcaacagtactagagattctagtcacagcaataaggcaagaaaagaaatgagacacccatattggaaagaaagaagtaaaactgactttactttcagataacatgatcttctatgtagaaaatactgaagaatctacaaagtactattagaattaataaacaagtacagccaggccacaggatacaagatcaatatacaaaaattgatcatatttttgcatacagcacagaacaatctaaaaatgaaattaagaacataatgctagatagtataacatcaaaaaggatttagtacatgacgggtaaatgataagaacagacattttaccaaagaagatatatgaatggacaataagcacatgaaaagtgctcaatatcattagtcaaaaatgcaaattgaaaatgcaacgaaatatcatttcacagccactgaacaggttataatagctaaaacagacaatgacacatatcgatgaggatgtggagaagtggaaaccctcatacattgctgagaatgtaaaatgaccagccactttgtaaaacaggttggcagcttctcaaaatgtgaagcacagagttccaataggacccaacaattgcacttctaggcatatagccagaagaaatattataagaacctatcatacataaatgcttgtgcatgaatattcatagcagtgttatttagaatagtagaaaactggaaacaacctaaatgtccaataactggtgaatgtacatccattcaatggaatattactcagcagtgaaaagaactactggcatgccccacaacatgaacgagcctcagttatgctcagtgaaggaagccagacacaagagaccacatgctgtatgattccatttgaatgaaatgtccagaaaaggcaaatttatggagacaagaaaatagattagtggttgtctgatgctggggtagaaatgaggattaactataaacaggcatgagggacctttactgggggggataaaagtgttctaaaacagatttatggtgatagttgcacactcggtaaggttactgaaactcattgaattgtacgcaaataggtgattttttatgatatggaaaatgtacctcagtaaagctgttaccaaaaactaaaacaaaaaacaaacaaacaaaaaaacaaaataaacacacagttgtaaaagccctctgccctttggatgtgctatggggtagaatgttcagcctctgctgtctcctgtttctgagccatccccttatggcgagagccacccatggcccttgggtgggcaagaggcctgtagctccctggctgagtctgcagaggtttggggacacctagctgccatactcccccttcatccaccctcatcccggggaaatcccagggaatataatcttgccttggaagcctttatagaactatcccacactgagaattaacccaatcagatgcagccatttgtgacccagtgagcattaactggatgcctgctgtacaaacagcactgtgtgtcacgcaaggaatgtgtaagcggacaggaccagatttcacttctcactggagaggcaaaaatccaaaaagaggaagctaagaatggtggatgtgttaaaagagaacaaataccaaacaaataccagctaatggagacatacgtgtctccattagttgccacagctcctctgtattgtgaattctgccaacctctccattctccaggggagggagctatggctttaactagttatgtggcttgtggaagttcccatagctaataagtaagtgttggatctaggactccaacctaagcagtcaggcactaaactcccctactcttaccactgggctagcctgcctatttaggttggcaaagttagagacaggttggagatggggctagaaaagggtctgggtcagatcctggaaagtctccaatgctgatccagggaggtcttattcaggatgcagtgaagctgtgactcacgggagactctccctagggcaggggcagagtgaactgagacctgggaacaggcagagaagctgtggccaacgaaggcaccagggaagggctagtctgagtggagagaggggacagcactgagaacagagaagggggcagggagctggtatcagaaatcagcttggtaatgggtgggttctgggggtgaagggagagagtaaaatggaagaccatgcctcaagccggaggtgggggctgagcaatgacgggaacctgtgggcagagttcatttcttcccctaagaggagctgaaccagagtgactaaaggaccgctgagctcccttccaggattcccagtccccagccccccaaacaccaggtgaagtctccacgctcttacctcccagctctggagctgtgtgacccacaagctcttacctcccagctctggagctatgtgaccccctgaagcaggtctaggtctggcccctccaaaatcttcaaccccacacttgtattcagtgtcaggcactcagatgctgcccactggacctggctggacactggccaaaacacacattctgggcagacatgcagtgcgctggcctccaaggcaggggccaggacaggagttactctccccacctacccacacagctcatgatagggcccaagcagactgctcagactgatgggaaacctcatgagtgcctcccagcccatggctccagggctaagcagacagactcctccacccaatgctcacacggcttagatccagctggccccactcacccaacttctgtcagcctggacacccacggggagcagggcaggaattccacagggcaactgccaccctttcctcaggaaggacaagggttgcaatggcactttggggtacaagccaccatcccaattgactgcaggattcaaacttcagacctcagtaggcgccaaaacaactaaagatccaagtgaatataaaacccagtggtgcaactctgagccagaatcctggaccacagcccatgaccacttccaggaaggcaaggcttccttcctctcctgcccctcccaggtggccctaaccctgtgcaacaggccactcgccagggagcttgaggggaagagaacagtcgggtcctggccagtcccaatctgtcttagagaagagaaggatgaccaacacccatgggaaggaatttggagcaggagaccagaagggcagggacaaggatgggtttgggctcccactgctgctctctatccaccgccacctcttccatccaggaagctcccagccttaggtagatgccgtaagacaagtggaggctgcactgggctggggaggtgtgacacctgggctttcactgtgcccctcccactgcctaggtcctgatgcccatcacagccctttctgctgcggcctgggaccttcccctcccggtgctgcagggagctccgcactcacgcatttaggtcactaatgtgcagcgctggggagtgccctctgagcacccgagaaattactttggttatggaactgacaattgtttccttccttctactccttccttctgtttggctgacatttccctctcaaaccctctgacacagggttccatcaggagcaccgcacccctccacaaccctctgccacggaaggtgtgcgaatgccccatctcctcctcacaaccctgtggacccatggttaggccgtttctttaagtgaagaaactaagtctcataaaggctcggtcttgctggggtctcacagtcctcgcaggagctaggatctggactagggtccttgagctagtcgctcaccctctctgagcctcactttcctcccaggtaaaacgcatgtcacaatacaatggggaccaaatccttaggcgggacacaaagggacaggggcctgggaggccttttgagaagctctgagcagagctaggcgtgccccgatccggcttgaggagcccagctcctgttcctccccatgtgggaaagagactggccccgcgtccgggccgcctcccggctgtaggcgctgggaccgcggggcgcagagaccccgcgcccagccaaccggacacagggaccaaagcgcctagcagacagggcgcaggagacgcccatcaggcggctcgcgcccccaggcacctgcactcaccgagggccccgaggaacagcaggacgaggaagacaagtttcatgtctgcggtctggaggcgacttggcaaacgaaggctctgccacttgcgcctgccctgcgcccctttattcagggctttgccccgccctgttgcccaatagacaccccttccctccccactccccgcggccaggtctacttgttccttgaggatccaggctccgaaaagccctgaggcaggacaggactccacaccgcgctgcgagaggaaagccagcctgcacctcacctgtcctggttctgcctggctgctgcgatgttctttctctcccactagtctgcaagcccctaggagtcgcagccccctgagccctgtcccagctctggtctcagtgccttctagagggcaggacacagagcagagggtctttacttgaagatcgccttgacctgtgagactgctatcttcttcagcagatgaccttgaaggtgcctaggagccagttagggcaggtggatttgctttcaccttggctcagcagtgagctgagagttgaaaagatgacccgaccacccccagcagcagcctagggacagctgacagagaaaagagaggctgcccagagtctcaggcaagctgcccatggggtatctccctgccctgctgagacccacaatacagctcccagaaaacagacagggacctcagaggggaatggccaccacccaaggctggttccatgttcttatttgccaatgagaaagatgccctatggctaagatgccctaccacttttttttttttttgtcttttttttctccatctcctccttcttcttttttggtgttgatagtattcagtaggaaatggtaacctcattttaacaatcgccataaatgtcagattttaaaattcaaaagctagaatactgcttctaagaatacatctcgtaaatacattcccatgacacacagcaccccaggtacaaatgtttccaggcaccactgcatgccattaatcagttggaagcaaactaaacatccatctctaggggagtgtcacatacagcatggtgcctgtgggacacattgggggcctcagaaagaatatcctgtgtgtatggatgtgaacttagcccaagagtaactaggcagggcacagtggctcatgcctgtaatcccagcactttgggaggccaagatgggaggatcgcttgagcccaggagttcaagactagcctgggcaacatagggaaacccccatctctacaaaaaatacaaaaattagcccagcatggtggtgtatgcctatggtcccagctacttgggaggctaaagtgggaggaccatttgagcctgggagatgaaggtggcagtgagccatgatcatgtcactgcactgcagcctgggcaatagagtaagactctgtaacccccaccaaaaaaaaaaagggtaactaagtgaagaaaaaaggtactaacagtgagggaaataataggtcacctgaacacctttcttggcaggtgagtctgaccaatatgtgactctgaaatctgcttattctgaaaagctggtcttgactctgcttagactacttggtactaaaaagcatttcctggagcagataggcaatgccccagggagccagctctgccaagagtgagcatgcagtgggcacctagccatggagaagcaggctcagcccaaggtggagaggccattaaggaggctggggagcccctccatttctgggcatgatcctgccaaggcacagggtggaggctaatcagggatcatgcttgcctgccatgagactggggtctgagatttggtgctagaatcaccagctgggttttggggtgacagatccaaggtctctcattgtttggaaacatgatattgcaccatttaaagttgccatcatcaataattgcaataagttctttcaaaaatactgaagaaatacaaaattgactaattcccaggagtgctgaagcatctttgtacctaaattggcaacaagactttgccttttcatcattataaaagaattaagaaacatcataacccgtgtctctttttctgagtccaaattttaaaaaaggatgactgggaggtcagagggccctgggccctcttaagtatgttacagtgttggcaagaacacagagaacctggggccactaccaagaggctcagcttaaggagtgccctgaaggcagcatgggtaggcaacagggcagactgttttcctgctgtgcctgttggaacagcccagccccagggcagggatgtgagcatctggacacaggcagagcagcccctcaaggccatttgcagaggaggctgatgtaggggatgagtctgccccaaaaaacaatgaagtttcactgatctattaacagcattcattcattcattcattcattcattcatgccagaactggtagatgccatgagagacagagaagaggggtctgtccttgccctcaggagctcacagcactatgggggagggacagtcacaggaatgcacttctatcacagaggctccctaagaagaggccaagcagcataaagcaagtgagtgtgagggcccagaggaggaatgaccagcacccatcatgagggctccagaagaactccaggaagatttagcctgggtacctgaaggaagggtgggatttctacaggtagagcattctgtaaagtaaacaaccaaacaagtaaaggcttgggagcatgaacccagtgaccaattacctgagcactagggacaacaaaagttccctctggctttctggccaggaattctttttttcttttcttttcttttcttttttttttttttttttttaccgacagggtctccctctgtcacctaggctggtatgcagtggtggtgcaatcacagctcactgcagccttgacctcctgggcccaagcgatcctcccaccttggcctcccaaagtgctggaattacaggcataaaccattgcacccagccatggcttggaactcttgttggaagaaggattaacaaaatcctcctcctctatcctgagctccacatcatgtgttcatctgcctctggaaaggtactcttgcaggtcctgaaggcgcctaaatttaatgcatcgaaaatgcaactcacccagtccctccaaccctgaaccttttctcatatttcctaccgctttccaccaaacccaccaaagagccgcagaggcaccctcaaatcctttggccagttagctctgtgcatgttataggcacttgatgatcaatatcggttgaaggaatgaataaatgaggaagaggaacaggctaagaaagggacaaaggatcctgtttgtaatgtgttgggtctgaaggatagtgagggtcagggctgcctaagccaggccatgccaaagcctgtgtacatggactcattaacttacccattcattcaacactggtctatgggacatctccaacgtgccaggagttgggtcagatctcaaagagcctgcagggaagcagaatgcaggtttccaaatgctgagacagtaacatgagtttaaggagcacaaagaaggtagctgctgtggaaactgccatgcagtggcaagagctagtgttcaacaggcagatgtgtgaggctgactcccttccccctaaccctgctctgcccccaccctcaaaactcctccagggagcctttacagaattgcaggcccaagccccattagcaggcaacagtctctggccaacctaagtcctccctgcaagccagtaaacctcacaccctgccctctatgagcctctagcttcaaaccccaagaagagtgttgggaaggaagtgtgagatctgagtagaactggcttcaggtgggataaggcagaaaaggccttcctgagacatcaactcacgcttggacaatagcttggcagatgggagaccttgggccctgtatcttttccctgccagtggtgagagattgctgacttgagaaccacttgttaaacatttagggatttggggtgggttaactgatggcagcttgatatcaggcatagtcgatgtatttatgccatggaattagcaaatgctctaaatcagggcttcctccttccacacccccagagggccagttgaccagcacacagctgcctacgttcatcattggtggcatgcagtgtccacattagtgtgggtgtgtttgtgtatgggtggctgtgccatccctagcagagaaataggataataatctttaatatttggatgacattttaaaatccaaatagtgctgtcagtgactttgtttcacatggctttaacaacgactctgtgagttaagacagtcactctttccattctaaaaacaggtactctgagtgtcgcctgaggtcacacagtgagtgagatacaactgctatccctgagtctcccattaggcccacagccaggggctttctcctccatgagccaagaaccctctgagagctcagggtgcagggactgaggcccagggatctcagcacaaagggaacctggcaagaattgaaccttccgtgaagcaggccctgcctggccccttccacacatcagctggcttctgatgctctggaaataccaaaaggtgcttgttatacctgtttccagctgagtggacttgggcaatgcaccctgttcatggtctcacagccagtggacagtagagctagaaatccacccgggaccccatccagtgacttcttagggccttggtgtcttagtattgatcatttatttgctgatcaccctgaagagaggggcagagaatgggggagaaggagaaagagatggatggagagctgcctgtgtctctacccacccaagtccccccaagatcccaacacagacaatgaccttgagagaaaggccctcacatttggccccacattggcccttttgaagacagccaaaggccctaagagtctgggaacgtttctgggctcctgggagcttccatcaggagggaagatctgctgaagggcagcaggcaggaaaacagtggcttcattagccaacacgtattgttgccaaatgttgcccaatttacaaaggccccacagagacaaggagcttctgtctgcttggatcagccctcttcttcctcttcctcttccctcccctcacctaaccctcctcctctgcaggaccctctgccctctggccctctcctcacagggacagccctcctggggctggcttctccaaagacctgctgagcttgctccccagtgggcaaggggcagtggaatgagctcatgcttccagtcccaccccacttctgagttttcaattctcctggccgggatagcaccccaagttcctggcagaatctgaactgagcacctaatcaccatatcctttgagaatgtacagcaggtcaggccctgggggagagccttctgggaaggtgctggcctggagggagcatgtgtgtggcccaaggccagccatgcaaatttcttcccagaaggaatgaggccctggcccagggaaagttccaggcagaaagtacctgagttgctggcccatggtgctgccctcctacaaggttgcattctggaggggactgctccacaggcttcactgtgctggaggcctctgtgtctgctgtctgtgtcctgcaaggacaagatcagctggatccttcactcagtaggagcctgagatgggcgagcagaggagtgaggaggcatgattttcctccatttctctgggtgaggctgctcatccccagctcttccaggctagagatgcccagctcctctgaccagtcctcaagcctcactactgctctggtagtggacttcctcatcccaccattcctttattcacctgacagctgggcagacgggaaggcatggggagagatgtggttagaagctcagagatgggattggctggctaagtttgaaccagttccaccctaaacagctccctggacctaggtcagtctctcaacctatctgagcctcagtttctccatatgtaaaaaagagacacaaataatatccaccgtatgaggtgggtagaattaaaacccgatgttgagatgcttgtgcagtgctcagtacagacaagctgtcattgatatttgcagacattcatgagcccccactgtgtgcaaaaacctcagctgggcacagaggttcagggttgagcaggaaggagcccagcttccagcagttcctggtcagtgagaggggctgcatggacccagagagtcgccatcctacttgcagacagtgttgacagaggctgcggggagttttgagagtggaggagagagtggcagagtctgttctccaacatggcccttctaggagagcacacactgcccccagctgcctgccttttctagagtgttcacagtctggctggcctactctccatctgtgtctctgtcctaatccctgcctcctctctttctctgtctgtttctctctctctccttggcttaccttctccctctctatctctctgtctctatttccctctctgccttaaacacctatgtctatacgggttatggatgcctgccatagggaggggctctgaccctgactgagcttcctctagcatagtacttgtaactactgacacctgtccctgcacccatgccttcactctgagttccaggagggaaaggactgtggttgactagctgtgcatccccagggtccacctccaggcttggcccagtggagagcctccctcagggctgttgaccaggtgagtgtggggagcagaggaggacaagccctgcataaaggtacacggagaaaggagcagggagcgggccacccgatggcccctacctcgccctgtgtagcacctacctgtgtgtgtcttgaggatggagaggctgaagaggagatttctccatcacccccagcacccagcacctgcctgcagagaagctgggacctacttctcctactgaaaggtctcctctcctacagccccatcagcttctaagggtaagcagcaagggcaccgggagagtatcagggcagtgccaatgatgagcaaaaagaaatataggggctgggggccatggggacaattcccccaaattttaacacgcaccactttaaggccgagatgctgtcatgttagccaattttgtttgcagtcagaggcttgttggagcctccagagggtccttggcagcccagggcctccctgtgtcgctctttctgggcataagtcttttccagcgaccctcctcccttctcacccttccctcccttctccctcccagctctagattctaccctccccatttcttcctctactcttattcagctaaaaccagaagtaaagctagcacaaactcatatgactttaggaggtgcctgccatgagctgtggtatttatagtgtgtgtttttactgaaattacaccctcccaaggccatgtggcaggcaagctacagagagttctcatccagagtcctctcgggggcatcctgtccactcatccttagcctcctgtgtgctactgttgaaggacagagaaggagcagagacagggagcaagatgcccctttttcgtgatcaacctagcaaaacttcatcctaagcaaagtcttcctccagagggtattaatctccagaaaatcaattttggaaaagattattgtgtgtgtgtgtgtgtgtgtgtgtgtgtgtgtgtgtgtgagagagagagagagagagagagagagaagttcttgctctgttgcccaggctggagtgcagtggcacagtatagctcacagcagcctcgaactcccaggctcaagagatcctcttgaagttcagccacatggtcagcccttttgagtaaagctgacctctccagaacatgtgttgttggaggaattagggggaagctgtgggtatggggctggggtccaggagagcaatgcctctgaaccaataatgttgttgctaaatgttgccccatttgtgaaggaaactcagcaatcaaagaatttgtctcagcttgaatcaatccttcctgcttcttccctttgtcttcttcatccctctctggaacccctccaggtggccttctcctcacttcatctggcaaggcgggggccagactccccatgtctctaggtcaatacatgtgtgtccttacagattcccctttctctttcagtcactacatgtcatctgggcccagatgcattcagttcttcctccatcctgcctcttgcgcctgcctgttcctttccattccatggtctggagatgaccttggactcctgcctcagcttctgaccactctcctgaccctcatctccccaagtgcaccctttcctgagggaaactttcagaatcacagagctaaccatggttccaaggaatattttcttgcccttcctctcttctcccataatctgctcctgaagaacctcaatctccttcctcctttggattaataccttctctgtgctgaaaactactttattctactctactctggcaatgtgtactcaactgtgaacagaacagctcagcctagaagttccaccagcgcctcaaaacagcatgtccaacttccagttctggatcaagatggagtaggcatatctctctctattcctcccactaagtacagattaaaatgctaaagattatagatgtagtggtttaaccagcacaaatgtattatcttacaatgctgaagatcagagtttcaaaatcagcagtgaactaaagaatgtagggctgttttccctctggaggctccagggggaatccatttccttattttttttcagcttctagaggctgactccattctttggatctgggctgtacatcattctcacctctgtggctctcgttacatctccatctcacactctgaccttcttgcctccctcctgtaagaactgtcatgattatactgtgaccatccagagaacgtccccatctcaagatcttaataacatctgcaaagtcccttttgccatttaagctaacatatttacagattccaggaattaggacatggacatctttggggtccattattcagcataccactccagtaggctgtgataaatcatgtgtgtactaagtaatacctacggtaaccactacgtaacctatacaaagatatatactcaaagttactataggtacatcaaaatggaattctaaaaaatgtttaagtaacccacaggacagtgagaaaaagaaaacagtaaaatctaaaaacagagagaaaaaaataaaataaaatggtaggcttaacactaacatatcaataattacataagtaaatagtctaaatactccaattaaaagaatgggattggaagagtggattaaaaaacataacccagctctaagctttccacaagaaactcattagaaaaaataacaatgtaggtagcatgaaagtaaaatgatagaaaaacataaaccatgcaaacattaataaaaagaaagcaggaagagctacattaatattagataaagttgaattcagggcaaagaaaattattaggggcagaaagaaacattatgtaataatgaaagagtcaatacacctagaagtcataacaatcctaaatgtacccatcaaaaagcagagctgcaaaatacatgaagaaaaatctgatagaactagaaagagaaatagactccacaattatagttgaagacttcaaacccctctaccaacaactgatagaacagacagcaaattagcaagagtgtagaagaattcaacaacaccatcaaccagcagaactgaatcaacatttatagagccctttacccaacaatagcagaatatgcattcttttcaagttcccacagaatacttaccaagatagaccatttcctgggacataaaacaaacctcaacaattttttaaaaattgaaatcataaaaatttattctttgatcacaataaaatcaaactagaaatcactagcaaaaagatagcagagaaatctccaaacagttagaaactaaatatcacacttctaaatcatcagtgggtcaaagaggaaacctcaagtaaaacttttttcaaatacactgaacttaatgagaatgaaaatacagcatatcaaaatgtgtgggatgctgctaaagctgtactcagagggaaatttgtagcaccaaatgattacattagaggaggaaaagcctcatatcagtaatctaaactgccacctcaaggaaccagaaaagggagagtaaaataaacctaaagcaagcaaaagaaagaaaacagaagctatcacaacagatcctaaagacaatggaaggataactcaaggactactaaaagatctctacacacatacatttgacaactgatatgaaattgaccaatttctccaaaaaaacaaactattgcaactcacaatatgaaacagatcatctgaattaagaaacagagctcatgattttaaaactctcaaaaaagaaatcttcagactcaaatggtttcactgtcgagttctactaaacatttaaataattatcaccaattccacacaacctcttccaaaaccgaaaagaggaaatactctccaatacattccatgaggcccgtttgttagcaagagagaaaaaggagagggtcatctctgttattcttgggagaaactccctatgagatgtcagtcactttcatctgctctccccctaaacacacacacacacacacacacacacacacacacacacacacacacacacaccctctcttcatctactctccaactctatggccctgcaaggcattaccatgggaaccatgtggctcctttgatccagctgcagccaattgaccattagagaccacccaactcaagctggccaagtaatcttttttaagttaaaaaaaactctcatatggagaaatataaaacataaatgtacaattgagcaaattatcccaaagaacactcatgtaaccaccacccaggtcaaagaaaactgctaacattcaaaaaccgcttatgcctctgctcaaccccacaccatctcccaacccctaaagctagctactactataatttctacactacaccttagatctgcctacttctgaattttatataaatggaatcatataatatgtattcttttgtatttgatttccttcattcaacattctgcttgtgagatcatcctttaattcattttctaatttttatttcatttggtaataattgctagtattagaaatacaatctatttttgtatttatccttctgtttgacaagcttattaaattcacttataaaatctaattacttgggagtttccactaacataataatgagagctttatcctttctttccagtgattttgcactagatgggactttccgtacaatgttgaacagatatggagataacagcatccgggtcttgttcctgatctcagaaggcaagctttcaacattgtccccattaatatgatatctatttgctgttggcttttttgtagatatgtagattctatagaaacttttgtagattaaggaagtccctttagatagttagttataaacatgaatggatgttgaatttcagcatcaactgagataatcatttgatttttctctttggttatgaatcataccaatttattttcaaataccaagccaaacttacatttctcttgcagtctgtaaatgacaatatttgtcttttaaaaacacactttttattaaagtgtagcatacatatgcatatataacagcagatgcacaaatcatacatgtagagtttgatgaatttttaaaatttgaacacctcgctaaaaaacagctctcaaataaagtaagagaagattacccgcccacaaaaactctatacatgcctctttccaatcactaccccagaggtgatcactatcctgacatctaacacaatgtattcattatgactgtgtgtgaagtttttataaatggaattgtatagaaggtgcctgaggttttctgtttaaaattttgtttattagattctccaatgttgttccataaagaaatagctcttacatgctcacttctgtataatctttatgtatgtgagtgtaccaaagttacctgtctattctattggtaatagatattttggtcgtttctaacttggggttattacaatggtgctgaagcgaacatatgtattcttttctgttggtcatgtacttaggaatggagttttacagcatatgactacgttctgctttagaaaattctgctagttttccaaagttaattgtagcaattcatattcccaccaatgtatatgagagttctaggggcttcacatccttgccaacactgccattgtctgtctttttcatttcagccactctgtttgggaatgtcttttgtccattgtttgattatttggtaaggctttttctcattggcggatagttctttcaatattcttcagagtcaccatttccctccacttgcctctgtgagggagcccagggctcctcctccctcagctcttctaagcccagatgaagcctggcccttctgagcacatcccaaggccacacctgcattctaggcgactcccttgtccctttgattcactgggtagtctggtgcctgaaaggcagggtcagtgatgagagtggttaaacatcgcaggcaggggagtttgaaaccagctctacctcttccccactccccagatctagccacgtcattcagcctgtctcagcttcagtgtccccatgtgaaaataggaatactaaaagcatctccctcataaaattgttagaacttaatgaagtaacttataaagatgcttagaacagtgcccagcacataggggctgctcaatcgatattttttgaacgaaggaatgggtgtgtgaattaataaatgaatggatgtaagattttcagtacaaggccaaaccatacagtgaaaactcagtcaatattaactattattgttattgtttccatgcatttctggtccccgttgtgagccagaacctatgcagagtcctgggaatctgcaaagagttccctttccccaggcggctccagttgagtcacaatccaacagaaggtgttagcaaaggcaagttcaccctacagggaggacagagggccgagcgggagccactttccccagtcttccttctcaagctaacccagcagcgtgccccagcccttttacagacatctgtctttgtgattccttgggcccctctccacacccacactccttatgcccacattctgtcctgttatctgcaaccctttgtaactctttcactcctctctcttttatgacgtccacttctctctccagttctctgtctctctcaccatcatgccctcttcccgccccactgccctgagacttttcctaatggcccctctcagcagcctgggcagcctccttgaatttctgctcaccagtaacccagctgcgtcccgactgtcagtcttggctttgctccacacatcttctctctccccctccaagggtctctgggctacaagggaagctttcccagaacccatgtggccactcagtcacttccccagaggctgaaggtcgctatgttggtgacaaagggcaggtgacacactttgctctccacagtgctatcagcaggcatgagcagggtccctagagagtgccagggaccaaagggtgaggccaggtccaccccgctcttaaccatcactccccatcttcctggacagtgcagctggatgaggaagcagccgcaggatgcaacgtagatgctagagggccaaggggaggacagaagagggtagggcagaagatgactggcagaatgaggaactagtgggtgggcctggggacctcgtagatgaagcagaacctgatggctatttggaaatggaggaaagagtcacaaaagtgagcaatttccaggatatttggaaatattctggcttgaggttactaccttgaaataatttgaccaagaaaatcagacactctcagaaaataatattttttatgccattttacaaatgaggtctctaagcccagagagggcgtgtggcctgctcagacctgacacagtgcggccaggtagaatccagcttcctgactccttgcacttagaggggttccctcaactaaagccatcctcacagagcatttatcctggaccaggtccttgttaggtactgggtcaccaaactgagttagactcagttctgcccccaagggcaacagacaagggaatagtcagttaccaccataggagatgagaatgtccatggaccacggtaacagaagaagcatggagaaccacgcctgtgcccaaggctctgtgcgtggtagggaatctgcctcccacctgtggcagctctggaggaggggcagcctgacctgtgacaggcagggaaaaccccatagccccctctctcccaccctggcatcttccagcaacctccacaaagtgggtttggccggaaccaagtgattgagggggagattacagggcccgggaattgtggggccctgtgggtacctagaagaccatctgcttttactctgaggatgtaggagccaaggcagaaggctgagaatggactgagaggcagaacaagtggggagcagagagatgattagggaggctccagcagtgacctgggagagagatgaagtggcttttctgtttgtttgtttgtttgtttgtttgtttgtttgtgacagagtctcgctctgtcacccagtctgaagtgcagtggcacgatctcaactcactccaacctctgcctccagggttcaagcgattctcctgcctcagcctcccaagtagcagggattacaggcaagtgccaccacccctggctaatttttgtatttttagtagagacggggtttcaccatggctggtttctaggctggtctcgaactcctgacttcaagtgatctacccacctcagcctcccaaaatgctgggattacaggcgtgagccactgcgcccggccagaagtggctttgattaggatgtggcagtggagaaatagtgagatggctggattcttgacatattttaaaggaggaggtcatgggatttgcttacattacaaggggatgtggggtgtgaaggagagaggtggatgatggcaccaaggtgtttggcctgagaaactaaaaggaggtagtttcattaactgagatggggaagactgggaataaagcagattgaggaggaggtggatcagaagctccattctaatcatggtaagactgacagaccccggacacccaggtggatcgtggaagagccagctccctgactcgctgccattcagaatggcattgttgctataaaagccaaagttagaggccttgaactttatttaaaactaatttttggaccatgggctcattttcctccaagaacaatgcctattcacacaaattgctgtgtccagctcctggggtttgtagaatgctctgtatcatgtccctggattgttctcacatttccagagtttggactccgcaaccttcctaactacccttgaaaccccactctgatgtttccacaccatgcccattgtgcctgtggtgatggattgtcatgcccttggctgcagggacctgccactctcctgccttatttcatgcacgttggttccttccttgctcgtggacccagagaggcactaaagcttttctctgcatggtccctatctggtgctgggcctggctctgggaatttcaaattaaaacctgcttgtggtcaattgttgacagcatcatggcctttccatgagagtaatagcaggaaatgtgtgtcccagctacaaagaggacaatggcacattcacgggcctcaaaagggtttgtgtgcagctttggacaatgttgatttgttattttacgggtcactctgcattgcccaccattgtcagtacacaaaagaacgtattgagactagatctgagcagtgaaatacaagacgtgagaattaaacctaggagagaagtctcaagaaggaagcaaaacttcctcaaactaggcatctgccccagggacagccatgcagcttcccctccaggtgggccatgggggctgacacataaaagacagcagccctggacagcaggtacacaactgccagtggaagtgccccagcctccaccctcctccactgctgataggcagcacggcccagccacactccttgcccacagcactcacaggctgtccctgccctggtgcatgatgtctctccttggcccctccaactctcagggccatttgagtgcagcccccctccaggaagctcagtacctgcacctttgtgacctcttccatcctgcaactcaccaccctgcctggatcacccctgagcaagtggtcctgtagaagttagcaactgcttatggaatcctttcctaggacaattatcaactaggctggccagcttgttcccttagccatagctttaatgtccaggaaactgctggtcccaagataggaggacaaagtacaaatgaactttgctttaaaacccaccaacagggctaggtgtggtggttcacacttgtaatcccagcactttgggtacctagatgttccccaaagtctgccaaacaactttgttctttcttttctccctagtttttaccctttactctccagagcccaggccccagctcaaacacctatgccactaagacttgggtaattgtgactattgtcatgattagccaacatggcgaaaccccatctctactaaagatacaaaaattagctgggcctggtggcaggtgcctgtaatcatagctactcgggaggctgaggcagaagaatcacttgaacctgaaaggcagaggttgcagggagccgagattgtgccattgcactccagcctgggagacagagcaagactccgtcaaaacaaaataaaacaaaactaaaaaaccaccaacagatgtagaaattggtgcaatcactttggaaaaccatttggcagcatcagttaaagcaggatatgcctaatgactaatgtgggctggcaagtgcttaataaccatctctgaaaatagagttccaacaagaatattggaaaaatattgaattattgaaaaaataaaaactattgaggtgtttgtggtaaagagtaagaagaaagagaaaaacactgcacatgtctcagaacgtcacccattcatcaatgacataagcattttttttcatgaatcagataatagttttttgatactggagaaatattttcttactttttatgcgactcacaatgtcacagctatagagatgacacacacctaagtttagtctgcattattaacattttctcaggctgggcacagtgactcatacctgtaatcccaacactttgggaggccgaggcaggtggattgcctgagcccaggagttggagaccagcctggacaacatggagaaaccccatctctaccaaaaataaacaaataaataaataaaaattagtctggcttggtggcgagcacctgtagttccagctaccagggaggctgaggtgggaggatcacctgagtctgggaggttgaggctgtagtgagctgtgatcacaccattgaactccagcctggacattaaagtgagactctgtcaaaaaagaaaggagaaggaagggaagggaagggaagggaagggaagggaagggaagggaagggaagggaagggaagggaagggaagggaagggaagggaagggaaaggaaaggaagggagaaagagagagaaagaaagaaagaagaaagaaagaaagaaagaaagaaagaaagaaagaaagaaagaaagaaagaaggaaggaaggaaggaaggaaggaaggaaggaaggaaggaaggaaagaaagaaagagaaagaaaggaaggaaggaaggaaggaaggaaagaaggaaagagaaagaaagaaagaaagaaaaagaaagaaagaaagaaggaaggaaagaaagaaagaaagaaagagaaagggaggaagggagggagggacaagagacagacagagagaaagagagagaaagaaaacaaagaagaaagaaaaagaaagaaagaaaaacattttctctatcactttcttaagtctaactttggacaatcaacaaaacaataaacctatgaagccctgatttgtagcatttgccagtttctgtggtgtaaaaactcctccaatgactgagttcaagctgctgacatggatgggtgccactgaatttggagttgggaggagatgaatgatattccactgttgtataacattcccaccatacagatacaataggctgaaataacctcaagagccacaggaatgcaagggaaagggaaatcagaatgggggaaaattttgcaaatccctgacaatgttaacagccagctcccatgagccagaatgagccaactccagcacagcactgcctggaacccagcctctcctctcctaggtgtacgcccagcagaaatgcatacatgtgtacaccaaaaacacaaacaagaatgttgataagagcattgtccatacatgtcccaaatgtctgtgagtggtagatggataaatcaattgtaatactatcaactaagcagtgagaatgagctaacttctgctgcccacgacaatatggttgaatctcacatgcatagtattgagcataagaggttggacacaaaagagcacctaccacctgcctgcatttatgtgaagctcacaaacagtaaaaatcagtgcccgtgaggccacaagataggggagtgttaaccttggggaagaggggcaagaaagtgattaataggagcaagagtggagcctgggggtggaaatgtttctattccttgatttgggtggtgattacacaaaagtgttcattttgtgataactcatctagctacacaaatattaattgtgcatgtttctatatgtaggttaggtgtcagtataaagtttattttattttatttagtttaaaaaaaaacggagacagggatcttgctatgttggcctgggtagcctcaaactcctggcctcaagcaatcctcctgcctatgcctcccagagtgctgggactatagatgtgagctgctgcaccctggccaaaagtttatttttaaaagcccccagcaggaaggcatacaaatgactttggcctcataaataaccttggcactccccagaggtgctgtccttgtttgggatgtaccagagatgcccttggaaggccccctggaggctacagagcaaagctttcttgaaatatggcctcctccctcaaatgtcaacccttgtcaatggctgaagagggaagggaggggtcggagaagacaagagcatggaaattcgtaaatggacaatagtcatgattacccaagtcatagtggcataggtgtttgagctggggcctgggctctggctagcaaagggtaaaaactagggaggaaagaaagaacaaagttgtttggcagactttggggaacatcttctgaacacttaccataggatgctgctctgaacactgcttgatcctcagccatctccgtgaggtaggtcctgtgaccataatccccatctcacagatcaggacactgaggcttggggcaagatgaaactgaggttccctccaggcagcgtcaggccttaggggctgtgctgtcctcacaacacccctacccttgctcccctaaaaaattgcatgtccctgctgggaaggcagtgccaagaagggcctggaatgttctgccaatatccaccctcctcccatgctggaactgagcccttatgatctgggggccccagcatattgttgtcaatcaaaattagctaaacttgatgaagcaagaacattaaaagtgcccagaggaggaataaggaaacagatgaaaaatgaagtcagacattcccagcaggtgctaacacctgaaggtgtacagtgtgtctcaccccatgcccctacccaccacctcggggcagagaggtcaattctttcacatccttgggggctgctggggaagaaaggaagatgtatgggcctggccctgggatgatgcctcctccctggccagccccactgcttacagaccctctctgggacccggctgctctcggagcagagccagctcctctggctctgggagcacctaccagggctgggggaatgagccttcttccattccttctactcattaaattctggatcaagtcagaccacagcccagggccccagctggagttccagggatctgggaagccaatagcagaaagcccagggtgcagcctgcccagcctgaggcaggtggctggcaggtgatgataagggctgctggagggcccccacgctttgttcccctcagtgcccgctgtgctcactcaggccagctgtgaaggccacgtcaccgtccactgggaagtgaggcggagctccctgctggagagccagaatgggcgggaatgcaggtactgctggcactcccagagggagggaaggtggggagctcggctgaggggaagttttccagaacttcctggcccctcagaagagctcccaccttccctccctctgggagtgccagcagtttctgcatgggaaagaggaagccctgtatggcaggtgtccacccacagttcggtgacagctgctggtggaattgaggaccatctgcttgcttagtgcagtcacaggaatgctgaactcacaggctaaggctgggggcaggggcagaggccccaacatggctcctagggagaattgcaggctctcctctgaggaagagacttcaggaggtgccccagccccaggaggccctcaaccctaacccttgcctgtgcccagtcactcactcttaaagcatccattcacattgattagctttattgcttccagcaaatgttgacattcacccctgtaaagtcttcaaagccttggggtcagggttcacctccatatgcagcagtttgtggcgcattcattgttgctgccattttctggttttggagaccaaggcccagacaggtctgaaggaaataatgtatacagtggtccatttccaagacaaagtgccttgaatcggcttaggtcagcaaactgcagaagaaacagaatgtactaggctcctgcttggatagccaaggcctgcttgttggcctcccctttcctcccccttccgccacacttggttgccctcacctgaaccaacgaagtttagtctaaggtaaaagtttaatagtctgcaaaatagcttgctttgtctgttcttatcagcctgcccagctacttaggtcataagtcaaatacttaaagagcccctaagctaaccaggattgcaatgcattgtgggctgcaacaaaatgcaccaaaacaaccctaaaaacaaacagacaaacaaacaaaacacctgaagcccctgactaacaatcaataggcaacatccaggaagattgtaaccccatagtactcagcctattgggaaccgggggaggcacctgcgcactagggtataaattgcttgttgaaactttgctgggtgtgcctgcatgccacacacccaatcttgcaagaccatcattaaaagtctcactttcgctattctcggggtctctgagtccattctttgggtttgaatgggggagtttgtttctcagaagcctatattccatccatgaagatgaggtgatctccaggctgcattagggaactcatatattcccagaggagggaacaaaagcagtagaatgaattgcagctgggaagactttggtacgatagacaccagaactgccactctccacagagaggggtaaagaaagctgtggggccaaaagaagtccagctcagccacataggtggaccaagataccttgtaaaggcgcaagtttggcctcactatccagccc

SEQ ID NO: 347 - DNA, 29733 bp, Homo sapiens
  source 1..29733: mol_type = genomic DNA
tagcaaactcaaaggaaaaaataaacaaattggcttatatttcaaagttttaggctgggagttgacaggagaaacctgtggaaattaacaaaggagaagagtttccaaggccttccttgctcacatatggatttgtggaggatttgaacacagctagggtcccctccaacagcaggcaaggaatactcaggccagtgcatacaggaggctcaattctggatgtgtgaatgtggctgttttttcctggagcatttatttattggtttattgagacagtttcactctgtcagccaggctggagtgcagtggcacattcgtgtctcactgtagccttcacctcctgggctcaagtgatcctcccgcctcagcccccaaaaagtatctgagaccacaggtgtgtatgtaccaccatgcctggctaagtttttctttttttgtagagatggggtcttgctatgttgcctaggtgggtctcaaatttctaggcttaagtgatccttctgccttggcctcccagagtattgagatatcaggcatgcgccaccatgtctggcccccatttattaatagaatatttaccatgggtcataggcaggaagcattcattgccaactgtcacttccctagggtttctagaaaatcagaagattgaaaatgtgagtaaatgtttcttactacgattgaaatgtaggagaggaaggaagcatttctgaaaatgcaaatcctgctttaaggtagcagctctctacaggggaatttactgtgggtgtcttggctccttacgaaaagagagagcaaatgcttcacagatcccctgatcttcctttgttcttttttgcttttgtcactgtaactaaactctcatgatacctgtgatttcagttgtttgtggtctatgtagcatctttatctctgtcagtcagaattgcagaactggtggtggttacttaagttggaatacaaatatgtgggcatgcaaacaaatgtacatgcagtaaacatttgatctacagaagggcctttgagtggtctcttctctagggcctgattgcttctgggctgttgacagcacagctcagtgctgcaaaggaagggaacatgttactggctgaactagaaggaagttttatatttgccatctctgaataattctttttccccacatgagggatctaaaagtgtctgaaaagaaacacatatgctgttgcagatatgagcatcatgattataggtgtgcatacctagtatgtatatgtccaaaaaacattcttggcgacaggctattcctgactttgcttcccctgaaactgaatgcaaaaccagtgtcattaaatatgctgctttgttgccaaagggacacttcttccatttgatttaaaaatatcactaggtcttctttgtgcagacatcctttaaaatacaaacactgctttatctaatgcagctatactgtatgtatacatctttttctttaaaacaaaaaaagacaaaaccagatttatggataacatgaactgctttctggatacgcaaacaaacaccaatgaaaacatttttttaaaattaacagacatcaactggtataaatacactgtctaaagcatttaatggtctttctttaacacagccaactcccccgggtttgaaacagtgttaaattctctcttgcttgtggcaaaagaagctgtcaagtccaacactgaaaaattggtaccatttcctggccagtaagcacagaacagaggggctaaatattttatggttttattcatttactgtgttctcatgctgtgtttttcttttctctgtctctccctcctgctcgtgtctgcccagggctgattgttgtgacattggccgtatgctggatgcccaaccagattcggaggatcatggctgcggccaaacccaagcacgactggacgaggtcctacttccgggcgtacatgatcctcctccccttctcggagacgtttttctacctcagctcggtcatcaacccgctcctgtacacggtgtcctcgcagcagtttcggcgggtgttcgtgcaggtgctgtgctgccgcctgtcgctgcagcacgccaaccacgagaagcgcctgcgcgtacatgcgcactccaccaccgacagcgcccgctttgtgcagcgcccgttgctcttcgcgtcccggcgccagtcctctgcaaggagaactgagaagattttcttaagcacttttcagagcgaggccgagccccagtctaagtcccagtcattgagtctcgagtcactagagcccaactcaggcgcgaaaccagccaattctgctgcagagaatggttttcaggagcatgaagtttgaatgtcaagcgagggagccttgagtgggaactggccctccagccctaagaaaacgtcactctcactctgcagtctcaaactatgcccccatcagggatggaatggacactggaggctttacaaaaggcagatgcccacctcagtgacttctaaggactgactctgccagcctggccttgactccggttacacagacatgggggtgaactttcactccacctccttccttcaagtacatactgaaaattcagtcaggctgaatttattcagaatgctttaccgagctctttcattatttgcacaggaacaaaagagaacacggactcccgctccctacccagaataaaaggacacccagaagaaactcactcagggaggtggggggttgggggcgagggctggaagaacaatgcaggagggggtggcatctccttcagcttcagcagtgtgccgagaagagggctaatttgaggaacaggatggtggtgcggagccctggcctgagggccgaggcagaacttccccttttcttgggccttggcccgttacaaagaggggtgttgcagcagctgatgcaaactgagttcagtttccctggggagcagaaggactggtacccggcagaggcgatgagacaggccgctgatgatgcacaggacttgcggtacatgatccctgtaacacagacccaaaggagctgagttaacgtgcaccggcaaaagaatagctgtccctctcagcccaaatccaaacggacagctcttccttactcctcccacagcccagagactaggtgaggtcagggaagtgcttcggattgtctcattgatattcaagatagatggtgaaagagacaggcactatttcattagttttaacaaaactgttccaaaagcgatttgagatgccaatacctgtgaatacctgttaataaagagctgttaaatagacttatttacattttaagtcagagttcacactgtgtacaagacacagctttttatttactttgtttttggttcaaactgtctcatgccagtgaggcccacaagcagtgcttctagattttatctcattttgctttataagcggccacagagcgctggctctcaactatgtgttgatgaaatcctggagttctttgaagacagaccaaatcccgaagggaaataaatgtatccctactgaatgggccctgagttttccacgggatttagtgaaggggcacctggctgaccgtgtgtccctcacagtcttattctaaggagaaacgctctgtcgtcaggacacatggccatctgccaagccagtaccacgcagctagcactcaatgacacacactgggtgcaaaaaaaagcttcccaagaagactagggggcctgtctcaaagagcatgtgtgtcctgtcaagctgcagtatagtcagtcatcaaattagggtgtcttaatcataaggtggaagtttattcaattcaaataatactagctaaacttttatttaagggcttccctgtctgtctcccaggcactattcagacacccttagcgtgtcagcttcttcactaccccaagcaatcctacaagggaggccctcatgattacccccattttacagatgtgaagcctcagggctagatttagtaacttgcccaaggtcacatgaacaggaagtggagcagctgggatttgaacccagcattctggctccatgctgtcaagacggtgtttactgtatagcagtaaattggattgccaattaaccacaaaaataaccggggattttttagggggagagggtttactttgaagatagcttttgttgtgtatgtatgtggcttttttttgagacggagtcttgctctgtcgcccaggcgcccgccaccacacccgactaacttttgtagttttagtagagatggggtttcaccgtgttagccaggatggtctcgatctcctgaccttgtgatccgcctgcctcagcctcgcaaaatgctgggattacaggcatgagccactgcgcccggccatatgtggctattttatatcaatgaattattttttttggatagatgatagtgtttaatactaaagctagacttagaattaacaggtcttaatcctgtttgctgccttgcacagctgagggatatagcatcccaccagcagccggggctccttacccactcctttcctgcaggtatgtgggcaggtgtggttttggttttggctccgtcctcgagaattgccactttgggtgctatagaaacattaaggaatgaaactgcctaaaacttccaagtgggaggtaaagaagtactttagatttaccgtaaaacatgcaattttatgtcattttttcccctctaactgcatgtttgtagggattgattttctaagaccattacaaaatcctggaaggcagctgctctggtaagataaagtcgaggtacagaggatgcctgtatctatgtgtgggaggcactgtttgatttctaaggaatacacttcagggaattgcccatagtctctacatttgccatccatggccctttttaggaaatcattctactctttttattcctaagtatgaaaaacattaactggcatttatttgccacttccactacagtgaccttttttctttaagtgaatttttaaacttttaaaaaaatatttactgaatgtatttttctctgtataaaatttcagtcagtaaggtgaaaatggaccttgagtacccctgcctgttccaggccctccgccgtgttcccctagaggcagatgctgtcatcagtgtggcatgccttcttccaggctggtttctgtacatttacatatatgcccacagagaaataaagtccgtgtgtttgcacacagttgtatcacatcctatacgctattctgcaatttgcatttttatttagtgacatggctgggagcttatttttaaggcgaactttgcagggttaaggatcagtgatgaggtaggttagttggataaatagtgcatgtccttatgaagagatggactaacagagccataatctttacaactgctaagaccctcatgtcgttagtcagaaacaatttatcttcataaggaaagttggggagaggtacaagctctcaagttggtggttcaggaactgagggcaccacaatgaggctttctgaaggggaaggttgacagctccataaggggcatttactagatgttccaagagggaggatggggaaaggtgtctgatgtcagataggtgtgtccattgccaggctggccgctccaggccaggcaccctgaggaggcatgagggtcatgaggctcagggtagctgtgggcttctatgagcctcccttggttaaaatctaagtctggaaactggcacgagagatgctttgggtgagattggatgtgattaaagatgtttccaaccggatgaaaggaaatgtggacctaggcatcaaggtaagtgacaggcaactggctggtgtcagggtatggaggagctagctttggagacattcaagaagaaaaagtgtgctagttctaaactgggcagtggcagaggaagcaggtaggaggtgttgtgctaatagaaatggggaaatttgagattaaagagggctttcagaaaacaaaggcattttactcatctttttgatgaaaatccacgtggtggagataacactgtgcctcctttgagaggcatgggatggggctgagtggtgaggctggggcagagggactgatatttggaaaggctgatgtttggagtctgcaaagaagtggaaataagccacctctcccatggcttcagataaagaaagaaaagctttccaggttcattgtaggcacttcagcaggcaggctggcgatgggaacggaggtgcagggacaaacgggaatggttttggggaatgctgagagctgccctgtaaggaacatgtgattgaataccacacaggctgctaggtagctttaagaaaatggccctgaggtttaggcacgaatggctgcctgcactggtgcaactggtgaagaaagccacaggagagagtcgaaggcaccaaggagtagaggggtgtagaataaagactcacactggaaggaaataaggaatgctgccaggtggggagggcccagtgaggacttagaactcctgaacagttccaccattcacatgcttaggataaattccaagtagatctaagatttaaatgttgggggataaaaaccccataaaagtactaaacgacactttggaaccttgggagattttttttttatgtaagagttgtaaaggctattctatgacataacacccagaagccattacagaaaatattgaaaaattagactacacacacacccacaaactctgcctaataaaatccctatatgtaagacaaaaagacaagtgaaacattggaaaaaataattgtaactcaaatcacaaagcagatttccttaatatgtaaaaaggtcctagaaatctataagggataaataataaatcagtaaggaataaataactcattagaaaaatagggaaagcaaatgaacagacagttcacagaaaacgcaacagagctttgaaacacatgaaaagatactctctcatatcataagaagaatgcaaattaaaactacactgagatgccattattatttatcacttgggcagagatttaaatgtttattataaacactgtgttcatgaatcttataaaaaggccctttcccacattgttggttaggagagtaaataggtataatttccatgaaggcaacgtggcaatagctatcaacattgcaaatgcatgtactctgtgacctagcaattccacttttacgcatgtaccctacagacatactcacatacatacaaaacgactatacacaaggttattcatggtagagtagagtgtcatggcaaaagaatagaccatcactctatctatcaccagggaagtggtaaatttccagtgtcttatctgcacactgcaattccacaaagccatagaagatgatactgagttaaaaacaaagcaaagtatgtctggaagttccctccttccttttctctccctcccttcctcctccttcctttaaaaaaaaaaaacaaaaaacaaaaacaaaacccaaatgagtttatgcttcttactatgcttcagatgcagttttaagagctttatgaatattaactcatttaatctttgtagtaactctagcaataatcctcattttgcaagtggggaaactgaggcaaaaatagggtaggtaatttgcttagggtccattcaggtaatatgttgtggagctgggatttaagcccaggagatctggatttataatctgtactcttaaccattatactacactgcctgccatgctataacatgcatccattggggaaaataaaaattaaacacattttacatgcatatgcataaaaatgtatggaaaaatacacaaaaaagagataatattggttgtctctggcgtgagattctaggcggccacaggataggagtgggaaaaagacttttgaccctttcttaccatttaaaatcagaaccacgagaagaatgatttttaaaatgacgtaaataaacacccgcagtcaaccatcctcaaatggcttctttctctgtgtagtacaaggttcttcctagctatgtccaccagagggctctagggaatgaccactctcaagaaaagagccaccaggagctgccccgaagctcaagtctcagggtcacggggcaggggtatttgtgcctgtggttctctctgcttttcctttaaccaggaccccataagctcaggtctgggcctgagggaggaggagctgtgaggaaaacaagggccttgtcatggactgctggtgggagcagagactggcataagggcagtcagaaggatctataattcaaaatgcaacaaataaaacagtcccattcctcaccatgtaccttcaaaacaaaacacactttcacatccttaataggggaaaggtacatttatactatacatattaagcagcagttaaagtacagagctctattctgatctggaaggttctcaatgacagttccagaatgatagttaagcataccatttatgtaagaaagaaaccacaaagcaatataatacgtgctccagtggtgtgtctgcagggggatgtgtgtgcacacatgtaagtgcgtgagttgccatctctaagtcatatcatggcaagaggtccagaggcaatgcaccagtgtggtcccttgggtggtagtttgacgggtccacaacacgatgaggcatctctgaaacatgagacaggtttggcaaagaacaccacggttcggcacaactgcagcagcaacatgggcaggaaggaatggctgggttctagctggacatgggcctggtttccctgaaacctcatggctggcctcagaaaccaccactgccgggttagggtaggagaaggtcatgaccaagaacagaggggggacatcgtttggagacttccccaaagaactgagagatgcttccttcccttcatccctgcatgatttttctcttaatcgcttctaatacactacagattttactagtgtgtctttattaatagaacgtaagctccagcaatcagaacagtgcctggcacataacgacacaagtatttaccaaaggaatgaatgaataaatgaagggaggaaaaggaaaagacgacagaaggaaagggggttatttgaagggggtctggaagtgcttttctgactggttttgagtaggattttattcctacattggtgtcacctgggtaacagagtttacataaagctacaattcacctccaggccttggttgacaaaggcagaactgtgagaggctctgatcttagttaacgcagatgcagacccagagctagaaggctcaactggtagatgaagggctgtccatcaaacgtggctcggataatcccagcttggaccagctcccagccgccctaccctgcagaggcacagagatgtgtcctgccaagaccaagtcatttctcacggctctaatccgcagaccaggagtgtgcccatggaacacaccacccactatcaccaaattaatcaagccacccagcgtttaaaactttaatcctctttaagtctttagaggggtaatggcctcctgggggctcttggattgagatgggtggctatgcgtgcttgctttaaaaataccacaaattgttctccctgaggaagtcatttgtattaatctgccttatttatttggatgtgaatgatgggcatgccaaggaatgaaggaaaggataaacaaaatactgaggttacttcccaggcagttcattccactgcagccattgtacctattccctgggacccaagaaatcagaatattaacttctttcaccaagctctggagtttccagaagccatgatcctctcctttaatggccttatcattaagtagatcctcatgtacttaatgggatggaggaaactaaagaagctcatgtccatatttcattctaattctgaaataattccttaccctgaggaaagaacatgaaccctggagtctaacagacctagactggaattctccctgagccacttccttggataatacacttcacttctgtaagcctcagtttgcctttctggaccaatgacccagtggacaaagctggagttttggttggactttccaacttcccaatggacagagctggagcaatttgagcaacaaaataaataatgatagtattggattataaccccatccaatcaggtaaatacccatgagttcatgctgacatagataaatgagtaaataagtatgtgcagaagagacaagtttttcttacagaaggattccagttaataaatgcagaaggaatgagggaaatagaaattaagattagaacaccatggtaacaactgatgtgggagagatccaccaaaagacactgaaattattggccaaagttggaggagaaacagtgtatttatatagtttcaaagtatctccctcaagttatttattaattacaatggaaaaaatagtaactttacagtggaaaaacccagcagatactatctgaatcaaaagcgatcaaagttaacatcaccagtaagacattgacagcatgcgccccttgctacagtgcactgagaagggtgcatctcttctgaggattcttgtcaaaaatgcaaaacctctatctgttcatgagaaaacagcagacaatcccaaactgagggacagtgtacaaaaatctggaccagtcctcttcaaaagtgtcaacatcacaaaagacatggaaagaatgatgcattgtcagaggttagaggagaaggagacatgacaatgaaatgcaacgtgggatcctggataggatcttggaacagaaaaaggcaaaactgtgggaatctcaaaacaaagcatggtttcattaacagtactgtgccaatgttaatttcctagccttgatcatcgtactgcggttatgtagattgttaacactagccaaagatgggggaaggatatatagaaactgcactatttttgcagcttttctataagtctcaatttatttccacatacaacattttttaaaagacattggtatcagctgggcatggtggcgcttgcctgtggtcccagctactccggaggcttaggtgggatgatcatttgagcctgggaggcagaggttgcagtgtgctgaaattgttccactgcactccagcctcgtgacagagtgagaccctgtctcaaaaaaaaaaaaaaaaattggtacgaatgtgggaaaaatctccatgttctttctgtgctacacgtacccccaacaaatgcagtgaaatacgcttgaccactctcatgctgagtaatagggtgagtgcatagtctgtgtgtaggtgacagatatagccccaaccatctgtgctattaactgcttaactcttgcctcaaagggcttggaggctcctgaaatgactggttttcattgtgatgggaagagaacattactgaaggaatgttttttcttcagtctcaacatccatccatgtaaaaggaaacaaggagtcaattagtgtgactcctggcctctttcccatttatttatttatttatttatttatttgatggagcctcgctttgtcacccaggctggagtgcagtggcgcaatctcggctcactgcaacctacacctaccaggttcaagtgattttcctgcctcagcctcccaagtagctgggactacaggcgcctgccaccatgcccggttaattttttgtatttttagtagagacggggtttcaccatgttagccacgatggtctcgatctcctgacctcgtgatcccaaagtgctgggattacaagcatgagccacggagcccggcctctctctccctttttaattctctctgccctaagagaggtggagtgatgtgtctgattggtaaatttggaaagaacagactgggcacacgctgcttatccctttcctgttccttcttgaaattgagtgactcatagcaaacaggtattctgccctgcttctcagggcaagaaacttcccatatctggtcttgtctatgactgggtcaaccagccggtttggagatgccaatttgaaagctcatttgacccccatccccaagtaattccctccaacttagactttctcagtagcaatggtgatatttcaggcctcatctgcctcgttccttgttttatttcttaatttccttagaatctgggtgagaaagaaggttgataaccattggacactcattagaccccagtaggtgccatttgtcccagtttgcacagtgtcctagaacttaattctaaagccatgattctcttgggggttgagaagcattttttttttttttttttgagatggagtctcgctctgtcgcccaggctggagtgcagtggcgccatctgggctcactgcaacctccgcctcctgggttcacgccattctcctgcctcagcctcccaagtagctgggactacaggtgcctgccaccatgcctggctaattttttgtgtttttagtagagatggggtttcatcgtgttagccaggatggtctcgatctcctgacctcgtgatccgcccacctcagcctcccaaagtgctgggattacaggcgtgagccaccgcacctggccaagaagcattttctaaactaatcttctcctacaaatagcccctggaccttgaggatcataaatggtcatcatttaacatttttttctgctagaagtattgagcctctttgttgtattgagaccaaaagaagatctgtcacccccctccactcccctacagatgtacatacaactttcggcaatctcagagagtttgaagctacaattctattacaaacgacgtgctacaagtatgcttttaaaataaattatttttccagttttttcactttaacctctgccccagtggtcgtaaaaacagaggcatggagactgagttcttttctgtggaccattatgcatctatcttttccaatagtttcctttgcctctgctcttttttgctgtacaaagacagaaatttctaaacagagcctttaatagtccattactttttacccatgttatgcaatgtagctttaaagacgaacttttccagcaaactgctgcttgtgtgaatgcctgtttgggagtgagacttccctactggaaaaataactaacacacactacaccatagttacgattacatcacaataaatattctatgcaggactaggaacagttcctcaaagaaaaatgcttggggaacgggtaattggaatgaactacaagcattttcactgagctcaaagaaactgcaagaaaaaagatcttcgatctgcatccaagtattttttttgtctgaaagaacactgtgtgaggaattttgacattctctgcattctaatgaaaatgacttggaaagtagaggcttctctatacatttgcctcattgccgccacgatgggcaccgtttatcaggaataaagagagaagatcaagaaagtagttcttttctggagaattttgtgctctggctcttaagtacttttgctttgccatgaatgtgaatattttaaaggccaaaaaagccccctccatttgagttgcagatggccacaggaacccaacaagaatgctaacaactcattttaaaaagggaaaaagaaaggaagtgccaagttccacactgcatatccatactgatgttgagcccatcttggcctagctggtagaactgaaaattgagaataatattaaggggctgcaatgatccctaagggtaaaaataaatgtgtttctgaaaacaacagccacatccacaatgaaatagacatgaaacaagataacccaagaacacatttgttttccttgtaacagggatgcgttaagttcattattcagaggactttgattacccttttcaaagatttttggtgagtttaattttcaaggctgttaaccactgatgtcaacttaattatagcaagcaaacaaccaacccataatgtatgatgccaattgttggttttactctagtcttgcattagacttggatttctttgctcatttataactttctgagggaggaaggtttctgcgcagtcacttgctttcccttagctggtgtctttgttctccagtttgccatgggggattgagggaacagatatttatgacttattatctcagtattaacagtgccccctcaatgatttatgaagctgtgctgttgcatttctaaccttgatgtccttctgattattgttctcaaatggtaagattaacacagtggggcccaaagattcttaatcagtttcttgcatacaaattcacccaaatgtagggaagagagagtccttggtggcataacgacttccagatggaatgaactgagaacatctaagcacttaacccaaagcacccttatatttgtcaccatgaacatgatgtcctcacactaaaatttagttatacttttgtatctcagcattcaatgaactagaattctagaatggcatgtacatcttgtgttaaagttcaggacatttgttggtatatgtgtttcttttcttccaaagggtgacagtgatccaggatgaaggtcctttgactatacatttcagcgttcaattgaggtaaaataatggtgattttcgggaaagaaaaattatccctgtcctttttccaggggtccctggaggtactttgttgaatttttctaatcttgtgcatggacttctcaaaagctgatctggcagacaatcacagttggccactcagtcactacccttacagctactagcggccatgagacagtgatctgacccatgaaatgtaaagagaatttctggggggactttggaaactcttttgcgttctcattaaaaggcaaagcttaagacacaagctctttggtgccatcccttcccttgaacctgaatacagtgatcatcttgtgatcaagaggcaagaaacctgaggacaaaaagccaacatgcttagggaagtaagaagaaaaatggagaaattttgagtttttgatgacatcactgggctgtaggagcaaccccaagatcacctatgtagactatcttgttacataaacaagaaatgcctttatggtttatgtccctgctacttgcagccaaaaacattcttatgtgatacaggaagcaaggtctagggtggaggcaagaacagaaaggacgggggcagcagtaatggctggtaaattctgttaggaagtgttgccccagagactaatgaagggatggaaaatgctgcttgatgcctaggagctgttgcagccatagctgccttggccttccacctgaggatgatgccaggttttgtcaatatcatgacagtgatattaatgatattcaacaaagggggcaagaatacaagcaattagttgaattcttagagctcagtgaaagagtgtaagggcaaagcagacagcaggagagtaaaaacgaagtttgtttgcttccctttgtggtttaatttgcccaaactgaatggtttagaagtatatccctcagctgaaagtctaactgcctgtgtcttgtggaacatacctgtatttgtaacttgcatcttctgtgtgggtgaggaccagggggcataaaaccatgtggggggattttccttcttcccaagggagagctgatgaccaaggctgaattccaaggtagcagagttccagctgaggactggccagtggtaacctggaccccagcttcctcaaccaccatataagctggtgttgtagaggtgtgtgtgtgtgtgtgtgtttcttgaaaacactcctattcaaagcaaagccaggtcagccttaaaagcaagctgacaaaaagaactataaaaccaggggtggattacatttcagagtggttccttaaattacaactatcactaacaggcattagtcagctatttctagtttaactaaaaagtaaaaggtatattcaacttgtctttattctatttttcttcttatgctaaacatttaagctccttcatttctgctataatattttgaaatggtgataaatctgttttagcttgaaacttggtttcttcaatatacgcagtcagcaaatagttattgcgtgtctccataccagtgagtgtgtgtgtctgtgtaagacagagggaaggtgaggtagagagagaaagagagagagagcatgagagagtgtgcgtgagagagagccaacagcatcctttcaggatcttgtacatagaaatgaaagccgtgaatgaagctgtagttcaatttgattaggaaaatgcactctaaaatactgagaggatgtgatgccaggcaaactgagctgctggctggagaacactgaacaaagatgaaattgtttctggatcttaactcactcttatgcagaatgtctcctgacttgctttatccctctttcccttgcagcagtcagtgacaggctgggtggaaagttgtccttcctctcagagaatgttaactcatcagcctccaggtgtggctccggcctattggctgcctttccctttgaaggcacagacactcttgagagaatcttgagctggctttggagctgggacccctttgcactcccactttggatgtcttcactgggtggcagactagtcaacccgctaggctctagctatttctgaataggttctttgaagttactggagacccaagtggtttgctacattttgcataagtaatagaacagtgcataaacccccttgcccagcatcacttaatacacctgcttctgctgatgctctttgaagatgcctccgtggagggcattgcaaactgctctgcacattcatattcaacccgtgtgcagtatgcatggaccactgcaggctgagagccgcgtgcctggcgcggcccgcctctagcactgtctccagtcattccactgtgctcacaaagaagtccaagaaatagaaaaacataaaaagctattgtccatgtccagtgagaaatgaaatgcactggaccgcgtatcacaacttccttaaaataatacaactttatcacttttgcatctgatcctgctcatggtttgcaaagtcataaaccccttgaaatcaatagcttgagccatcgctgctctattctatttaaacacatcctctaaagaagcaatttattacgaactctctatggtttcaccttatctaaaacacttaattcagtccatctcctgctttgctttgtagtgttggaagcaatcagaagactggaagcaatttactaataagagaacatgccctacagctctggcctgtgaaaagagtttcagaatcacgatgtagccacaagtcaaattctagaaagaattaatggcacatctcatagttctttcatttgctggctgattcattccaggtatgattgaaaatcctccattacaggtatggcctcttttggtgttcccagggtaggaaacacattgtcttctaccagcaactttgctccagctccctgaaatatagtcacttctaccaccatgaaaactacaaagcaagggagaatccagcttagtcttctagaaaaaattaacagagaagaaaagatatgtctcatggttaaatgagtaaggagttctgcctatacaaaggctgtaatcaaatgatttggtttgggggacaaaagctaggcttgtgcatggacatggtattcattgtagacgaccaaatcatgccagcatctgatctctttaaccaaaacctttctccacaacctctctcaacctgctttatcctcaagctttctcaagggaagagagagaaatggacttatcaagatgcttaagccccccaggaaagaaaactcccttctgcaccacagtgtactcctctgtaaagtgaaagtgtggaccagagagaatagggtctcttctagccttagaggtgtgggattcttgaggacggtggcctaagagtgaggccagatgtggagctgggcatctgggaccaccaacaggggcctcaggaatagcccatccatgtgcctgaggattcctgtgtttaaaagaaactaattcaagatctcaagggaaaacagatgaattatataatagatgggcaagaatggacagtccagtacatggcaccaagcagatgtttgatgaacaccaattcctttgccgaaaactcactggaatggcttgctcttggcacatgttgttactttaattcagcaaattggctaattggccagtggagttctaagattcacagccatgctgcatcccattccattctcattctatcccattccataaggtagggatctgctaaacctgagctttctttttagatatctgccccagcaagaggaaggacacatctacctatggaataaaaaacaaaacaaaacaaaagtggaagtggtatggatgagccataaaacatgatcctaagcaaaagcagccagccacaaaaggccacacagtatgagatttcacttacaggaaatgtccagcataggcaaatccatagaagcagaaagcagattagtggttcccaggggctgggaaaaggggaaaatgaggggtgactgctaataaaataaagtttcttttggggtgatgaaatgttcttgaactggtggtgatagttacacttctctatgaataaacgaaaaaccacataattgcatactttaaagggtgaattatatttcaataaaattgttgttaaaaatacaaaaaaagcgggaaaacatagaaaatggcaccacagcggaaaaaaaaaaaaaaacctggagaagtgaaaggtacttgaattcctgtcccactggctgtgtgatcttgacttttctgtgtcttagattcaccaactatcaagtggggatattatctctttgtgaaccttctaaattaactatgaggatactactgttaggaactaaaggctgaattcaaggactccctcattctgagaaatatagaaacagtgtacaaactaacttgtactataatatctgggccacccttcagaagcaggtatggatagtgaatggggcaactcctggtgagcatcaagacaggtttccatgtctagcactggttccttgaagatggttatactgaccgcatttctcattctcttgctgtatctcataagaaaacagtcagcctgtttctacattttacaaggggggaggctaagcccctgggatattaagtaaactctttcaagttaccaaatgtgaagaacctagaacataggggttctctcccctaagggagccaatacactttccattggacaagtaaaaaataggggttgaagtgttgagtccttttgcacagtgtgctaataaacctttgcttagtttggacattagaacctaagttggtcaattaggaaggaaggaaggaaggtagggagggcgggcgggagagagggagggcaggcaagggtacactgtctctctcaaaggctgtagattcagaatttttgtttcaggagtatgtaagggaggcagatttccttttcaaagttcaaagaaaatggtatgttttgttttcatacttcgtttcattttcacttgggaaaaatgccccagctttgaaacctctctgtttaaactcattaggaaaactatcaatgacagcagctttcatgcaatcatagtgggaggaattagtgttatgggagagctggatcaatcttcaaatgtttcatctatggagatgggaggtcagcaccggctgcttgttcagctggaaagttaacataaacaaatacttcactcactgggagagtccaagggaaagacatttgatattccccctctgaatacttcctcagaaggcacatgaaagagatagttgcttcttgagaactaagtggtcaactgcttggcaaaatgtctcatctcgaagagcaaggtgtttgttcttttagtgtctggaaaggaaaggaggtagggatgtgaacattcacagaatagaatcccttcctgtgtaattcctaacttcatcgaagttgatatggaaacccttttagcggagctggttttaatatatgaagatatattttttgatatccaaatatgttttaaaggtttttttgtttcgttttgtttttgagacagagtctcactctgttgcccaggctggagtgcagtggagtaatctcagctcattacaacctccacctcccgggttcaagcaattctcacgtctcagcctcctgagtagctgggattacaggcatgtgccaccacgcccagctaattttttgtgtttttagtagagatggagtttcactatgttggccaggatggtctcaaactcctgacctcaggtgatccacctacctcaagcttcccaaagtgctgggattacaggcatgagccgccgtgcccagcttcattttaaagttttttaagctgttgaagtctcctttgccaaaaatagaatgtggaactttgtttttgttttgcactttattcatagagcatattccatagcccatctgattgattcaaaatggggttaacagtgagaaattaaggactgcagatgggatgtctaaaagagagctaacaggagaggcctggtaggaggaggagagacagggacaaatggaggacgctggaagattagcagagacccctgctacttctaacaaagttgttctgcaaaaataaaataaaaaaatcttagaaaatgttcttcatgcctacaacatagcatggattaaggaatttgtgatctcagtatctgtaaaggttaactcaatattttcatttttcttacaagcattgcatatgtgggtatatgcaaatatatatacaggcaaaaatggaaaagtatatccacacacacaaatatatgactgtgtgtgtgtgtgcacatatgtgtgcgcacaggcatttgagcttgagtgcatgcactcaaaagaatacaggaataaagggactatgacaggaatacaggaataaagggactatgattagcagcactgggcctcattcctgccaagcccatcccaaggccaaactagagcctatcattttagatctcggggaaattaagcagacatagacttaagaaaacacaggctgtggttaactttccacttctttctactaagagtggatgaccaagcatttttgcgacatctagtcctctgttgctatcccttagttagctcatgagaaaataaggtgtaaaactaaactatccaagatatgaagccatccctgcccaacttaatgagcaactaactaatccaaaaggaaaatagccattacttacacagccataatgtagatgcaacatggcatataaatcagtaactcttgtattgcaaaacagacaaatagattaatgcatgttgcaaaggatgggtgaagagatcgattaggttactgattcagaccgtgaactttctctcaatatactgcatttaacttttaaataaggtttaggagaacctgtaacattttgctcactgacagagctatattttactaagggaagaaattggctagtctataaaaattaaattatgcccctttcactgtatctagtcaagaggaaaaactctaattacaagattgcactgtcaaacaaatgcaaattcacattctttattccctggtttaaaaattcatactggagggggcttctattctgaaatgaaaatcaatatttgaaatattttgcagagtgcaatgacaagcaagagcaaaagaagtgtcattatcaagggtgctagtaaatagacaccaactcattaagtgcagagctagtgagaacaagtcattcattatgcaaatatttaaatatcaattagtaaggacaatgaaagaagttgaaatgaaccttcccttccccacagccagtaccttattattccagaaatgaccaaagggaacaagagtggtggataataatctcagcacataatagcaatgtcactctggggaataggtaaaggttaatttcaaacatacttcccaatggaaaattaaatgtacctgcctcaaaatttttaagagctgagtttacagacttagtccagaaaactgaaggcctatgcatattgcatggctggtattttttggaaagagaacacctttcattactgcttaatgtcagactggcttagttcattaaattttcttagtcgatttaaagccctggtttttccacatctatgaaaaaatgcaagtccacatagcactcaaacttaaaaatctcactggttgcttcccagattcttttgacatccacttcatggcctgtctacctggactgttaggtgaacttggtggatatgaaaaatggcctaaactctttgaactttgcctggactatcttttcaggcagacctggcaggatattttacgacatgctggctgtgtggtattacagcaaaggtgttggcctgagaagcaggcttcaagcgcctcttagtaacagttggctggtgaacttggaccaagcatctaattttcctggaccttgctttcttcctctgtaacacaaaaagttttgtccagatcagttctcaactcgggtcaccccagaatcattgggaagtttataaaagacccatggccagatataccacagactatgaaatgggcttctttaagcagagacccaggcatgtggagttgaacaaaactcccagcaagattccaacatgcatctttaactaggagtcactgggctctttcagctctagtatgctgagattctcaggacaacatatgttattgatcaaacttgaaagaaattctgacttcaattcttaatagcatcatttaacaggcattactttctctggagaggagatgttgaccatgtaatagaattacatgctgactggctgtggcatgaggaaacaagatcctgaaagaggaccaccagatttcacgagattctatatgtgcaacccacagaaaagagtcagatgccttgggcgctcaacaacagttagctcttgttaatatgatgattatactacaactgtgttcacttaaagttttaggtttgctctctatccttattggcaaaaaattaaattggtccctaataagtacatggacataaaaatggaagtgctttggaggtataaggcccccctggacattgctcttttgatgcagaaacagatccgtttggcttgtttctgtggagtttaggcttagaatgccttgcttccatgtgcacacaccccgacctagcatccttcccttcaaaactttttcctttgagttcatcgactgcttctgtttgtcaaacttcacaattgaaactgccttattacttgattctgtctctacctgttgggctgtgacctgtggccagaggggcctggtttggagacaaggtacctaccttgtctgagcttatagaaagcgagcaaccttaggccagacacttgaagtctgtgctgaagtttctgtggataaaatggaagttaaaatgcctgctctgcttcttttacagagtggttttgaggacagaatgaagcaagatgaaaaacagcactttgaaaatggagtgtgtggtattcatcttagatacacttttagagaagaagaaatgtgtctcagaaaaaggacctcttctgactcaaatttagcttacatccccttctcaaccatatcccaggtgataaaatatgacacccaggtaagcagtggccttgtggactctgaagaagttcttaacgtgtccacggcacattctcattttgtctggctctaaactactgtctcaagaaagctgcaaatatttgaaagtaacaataaagtgttaacagtaattctgactaaaatcacagcagtccctctggtagaaaggcagtaaattctttgctcaggtaaaacgtaggaaagaaacacaagtagaaaaaaatcccatttgttcaaattatccctatcaatcttaagaattatcgccaagtttgttttgttttgcatcattaatagcccaaatcccacgtgccaaaataatgtttaccgcatttctcgagacaagttacccttgagagccagtatgtctgaggcttcccagaagagtgattttggtgcaacaaataatgacctatacaaaccagcccttacaactgcacacacaccacaacacaacacagtgtcaagctaacatctgctttccaaataaccatgaggatagcaatatgacatttccaggcccttctctgagaagaaacgactttcccaaggtgttggctttgaaactagagtccttgcattgatttgccagcgggtaaagggaatcatataacagttctaatcacttcaccgggctctgcaggcagttcacagaactaaaggaagtgggggctttggttcattcactatcagccatcaagttatgctatttcccatccttttaatatccttaaaatggcaaggtctgtgtttatggttttgaccttgaaactgaagtaacagctctacctattctcccaaagttccagatatactttggggaactttgacttctgataagacagctggggtagggggtgaggagagggttggaaagttctacctcagtgagaagattcttggtcaactagagggagtgagggctatcccacaagacctccccttcccccacaggatgctcaggacttcttctcagctagccagcagctaagctggtagggctgagaacggcattcctttgaaagatcttggcaatttgtgcctggaagttgatgcattagttctaaaattaaacaaagatcctgtagtgttcttcaaggaaatatggtgtgcctctatgacaaaacacatttttcaagctctgacctctgggagcttcaactagctccatatttcaggctgacaatgctcacaggctactgtctagttgcccaagccagggctggttagccatatattttctacctccatcagcttttagcatagggaggtgaagggagtaaataaaaagaggagagccactaatttacatgcacttcccctcccaagacccttggggagaagccttggtaattaactctaatgagattaaagtaacttggaactcttcattttcccagcactgtaaaactaaatctgcgataaccagtgtgtgggcattaaatcaaagtcagtcctttttcctgctatttaatggccccctcactcccaccccacagcccaggcttaagagcgagggggagggctgccaggctcttaccggcactttgctccatcacttctttctgacacatgtcttgaacgttcaccgtgcaattcacaatgaactcgggggaggagcagtcgttgttcagctggaattcttcacactggtagcactggatttgcagcgcaaagcctgcgagacagacgcagtcgggttcagatccggcccccacagagcccaccccggaaatcacgaccatcccacgcctcagagccaggcggctcccagcctctggcaggcttagaccactcctgggtctccgggtagggctggatgtggctgacaccggcagggggcggcgcgggtacctagggtcctacggaagaaagtggaatagtgcccgccacccctggaccccggctctagacacaaagcgcccatccattaccaccccaggccttttcccaagaagttgaagggagggtggggacggtaccaccgcaagagtgaagtagctctggagatgtgcgttagctccagcctaagccaaaggatttgcctaattgctaattggttacaaattacttaattactattttggcaccattcgtgattacattcgcagacgtctttttagtttttatttatttaatttttaaagtcagcgtttctgtgccagggctctgaggatccctgagcgaccacctgggaacaacttgggtggaggtgccagacgccaagcgctgctgcgccgcaagtccccgagcccgggtcggcggcccttctccggggccgtccccgcggcgacccgaatggccacagagggtgggaaagggcgtttgtgagcgcgcgcaccctggatccccgaccccgcagccctttcttccaggccccggctttcaggacaaccgttcgactagggtcagtggtcggggttccagctctgcagagcttagtcgggagccagtaggcgaactggagagaggacgcgagacctttgcgcctctggacgcttcggcctggctgttctcggtgtacgcgctcctgtctagacccaactacccacgctcccgcagccccacatctatcgcactctgagcgcagcaacccagcttcagcgtggccgcaggctgcctcgcgcatcgctcacctgtcggcggcgccactcccacggggtgccggaggcgccagacaacttggcagggttcgggagatgtcgccccctctccctcgcccagaacccagcaccgctcggaccctccctcctctcaagcccagcttctcccgacggtgcagccggacaagctgcagcccggagtcccgcaaacccgccgctccccgctctcctcctgcagcgcgggacttggacactttcccagcctcgcgccccggggcaccagtcgcggccgccaactcccgctgggcagccccagcgcagggctggccccgaggtgggcgccttgggggcaaaagggctggcgggtagatggattgtgcgcacctggcctcggctgctggcctctgggtattctcacctggaagcaagaacaatccgcaaaaagttgccgcgatgcctaggacccacattctcccggagtcccggggccgggagagggcaagcgcatcagaggaggcgacagcagcggaggctgccccggctgcagcggctgtggctgccgaggctgctggggcccgcgctgctgccgcggagacgacggtcgtagcttagaggagccgcaggtgccgctcgcggagcctgcatcgcccgcgctcgggctcccggctgcgggtctctgctcctcccgctcgcgctcccgggccgagcaccgcgcctccggagttggcggctgagactgaaggaactactggcgatcgggagcacccacaaaagtctcgccttttctccccacctcccactccaggcatcacgtgacggctgccgagttggggtgggggtggcgggcggggaaggctgggacggtcgcttcacatccccacccccttcctgtcttcctcttctcccgcctccgcacgttcctgggaaaggggcgccggggggcgggagagaactggtagttttctgagatggggaggttgggggagcggcgaggagggcgcagcaggtgccgtggggacctgccgggtgcggactagggtctgaggactgcgtgcccggctggcccttcgcacataggaaggcagcctccccactccacgtcctctgcgccttccaggactggtcggtaccccagcgactgggtccagcccacacaactgaggctgtcccgctgcgggccgcgggagcctggcgccccgggaggctgacaggaagggcgcgcgttcccgtgcgcctggcaaagttccacgcccgcaggctccgtagggtgtcctgtgcagctgtgccccctcttcctccgcgaaggccttctgtcaagaaccagctcggcgtggccaatctgggtgggggtgtggtggggacactgccttaactgtctcacttgcccgggccgccctcccttctcccgcctgcgcgcaccgctggagggtgcattgacaccgccctggtcgcctagcctaggagaacgccgtcccggggacacctgccgtgaggtcctaccagaaagcaaatcagggtgaggaagagggttgttctcctccattccttgtctcccaaacgccagccggctccattctgctttccccaaagccaccgattattagcacatactcccacgtcctctcctgaaaggccatcccagcctcggactcggcctctggctgctccccacacccctcaaattcgtcttctttccgcaaagtccaagtgacccaccttgcggactcccggggatgccccggtgctatcttcgccttccttcccgagccttgcagcaggtggtgcgggagaccgcttgcccgccggagtgcgttggtgcccccgcccccaatccgcacattcccatcccctttccgcacatccttagggagcatccatttccgtggaaatcgcctcctaagctttagctcctcttcacccttttctcccccggccacttctgggggcagctctctcacgccgggacgctgatcatttatttctgcatcctcccagcagagctggtctgtaaaggggcttaaatgactttctttgtaattcctctgcagagatcgttccatatctgcctcaggctccttctctccctccctccctccctctcccccttctttcatttctatttggttaacccctcggggagactgaaatgctttgaccattactcacctgtctgcagactctgatcttacaattggctaaattactatctctggagcaaaagggccaatttatttattccttctgggaacccattgtaagagcacgtgtgagtcatgattcaagtaactgactgggccaaaaggtccttgagcaagttattttctgttttcagagggtgcaaatgtgatataacttttattcagaaaggaaacaaaaagattttttaaagtctgaaagacaaggacattttacataattttcatttaagataaaataaaacaaattgcacaaattaaccaaataacactgatcatacaatactctttaaagaaacaattatgtgctaaagtagccatatagatcctaaaaatatttctattgggcctagtttacaagctcctgtacataagtaattataaatagttcacatctagaaaaaatacacataacctttaaaatagaatttatccttacatataaacagtctttgtagaaaaaaaaggatattaaaaagaattcttcgtagcaccattaattttatttttaaaagtgaacattgcaaatagaaatttgttttcatttttagagtgcccagattttaataaaaagagcaagaagataaaaatcaaataatattcaggatcatagagaagcactaagtaaaagacaatctaaagaaatgtctggaaggaaaaactggtattgggaatagaattcggtcatttctgatacaatgtcacactcccaatcagtgtccacacttcaggacccttttcatttttcagcagaagcagaatgacacttattactatcacctgaatctctggcaacgaatctgaaattacactaaaatgaacatttccatcaaattgagatttgtgagatggagatgaggaggaaccctccgattttttggcaggccctgttgtaggtttacagagtgtacccacaaacaatttgaggaccaggacaacgaacttcacaaaaacttcagttgggattttaaaaaatatatattatcatcaacttctaagacttagtacattatttcaagagcatggcactgattccatttattgctgtctttttttgctacaaatataatttctcttccaaaaaatttacaacttctgtacaaatattcaaaaaaagtgcaaaattaaggattctgtatcatagatgtgtttacgcttaatcctcttgaaacacaataaatggagtctatctttattgccctgtcagagaaataagctctggtgggttgcctgctgtgaatttgacaaggaaggctctggtactgcaatagtttattgttatctctatcaagcggtgcaccccccaccccccacccatcatttcttaagcgctccagtcc

SEQ ID NO: 348 - DNA, 170555 bp, Homo sapiens
  source 1..170555: mol_type = genomic DNA
ctgattgagcaggtggagaagcagacctctgtcgccgacctgctggcctccttcaatgaccagagcacctccgactaccttgtggtctacctgcggctgctcacctcgggctacctgcagcgcgagagcaagttcttcgagcacttcatcgagggtggacggactgtcaaggagttctgccagcaggtgccgtccccctcccctttactctcggccgggggagtgcagtgggcccacagggcctggggcggggtgcggagaccagggcctgaccggcacctgtgccacaggaggtggagcccatgtgcaaggagagcgaccacatccacatcattgcgctggcccaggccctcagcgtgtccatccaggtggagtacatggaccgcggcgagggcggcaccaccaatccgcacatcttccctgagggctccgagcccaaggtctaccttctctaccggcctggacactacgatatcctctacaaatagggctggctccagcccgctgctgccctgctgcccccctctgccaggcgctagacatgtacagaggtttttctgtggttgtaaatggtcctatttcacccccttcttcctgtcacatgacccccccccatgttttattaaagggggtgctggtggtgagccgtgtgtgcgtgtccctgctctgctgcccgcctggctgctctgtctgctgccccctccccccaggtgggtccccctgcttttcacctatctactcctgagcttccccaacaggagcaggtttgaggggccaggcctcttggaggcccctcctgcttcgttgggttctgcttccttcccttcttagctggctcaggggcttctatgggatcctggaagttccttagggacttgcccagggtcccagggccacccacacttcatctgctccctcataggccccacctccacgtcccggctgggccccagaccccagcttcctgccctccaccgggagtctgcatggttgggagtcctgggtggaggggcctttgtgaggctggacccggctcagggcaggtggaggagctgggcctcccacagggtgcccgggcagtgccatcctggtgggggagggcagccttcaaacgtgtggggtctacagtcctcaggtctaggcagggctgccggttctccacctccccatccgccccaggccccctgcctgtgcctgccttgcaccccctctgcttgggccacggtgtctctgcattgcctgcctttttgccttcacctcttttcttccccgccccctgcacattcggggtctcagcccccaggctgtgagctccttgggggcaggccctcaataaatgtgaactgctgctgccgcctctgccgtccgcctgtgcctctgcccgcctggctcaccgagagctcttgccagcccctttcagtgaaagcatctggccaggggctccatccaacacctgggccgccttccttccccccagtcagagctcagacagtaggagctgccacaacgagatctttattaggctcctcgggggcggggcgcggagggaaagaaggggtggccaggcccaggccaggctgcaggctttggcgacctctcagagctgggagcggggtcccgaaggcgggtctgagggcagagcagagtcagaggtgtctatgggcgtccccgacctcccaggctgccccgtggtttcccgccctgcttgggggtgagcgggggttagtgggcgggttagtctagggccggggccgccgcacggggcgaggccctgcttaccagtcccggtcagggtgggctgcgggagcctcaggctggaaggcagaggacagtgagagcccgcccccagggtggaccggggcaggggcgggccgtggggcggcgcggggcacgtacccacggggaagtagtgggggagccggctccggtagatgtcctcgtccttctcgaggaacacgcagatgatcagccggtccacctgcgccaggggctgctcagcctgggccgagctgccacgcctggccccaggatcctgtgactgcctgccctggtgcaggctttcacctgcctggccctgcgcccttcacggaggctcacggctgtgtgccatcacccccatctcgccaccgccaggcgcccttgcgcaggagaaacagggaaggaaggggcgggcctggccctgcgctctgcaccctgactccctgggcgatgatgggggctggtcactctggccgggatgcggaccccaccctcgcccgggcccaggactcaccttgtccttgtgctgctccagccactctcgcagcgtggccagcacgatctcggcggccgcctcacaggggtagcctgaggcgggtggggcgggagtgagtcctaggctctggccccgcccactcccctgtccgccccggcccctcccggcgtctgggtccaccgcccactcctggtccttgcctttcttccagactcaccaaacacgccggtggagatgcaggggaacgcctgggcggggaggggtgagagggggttggaacattgtcactgcgccccgcctcccgccctcccccgcgggccgtccctcaccaccgagcggagccggtgctccagcagcaggtccagactgctcaggtagcagctgcggagctcggcagcctgactggcgctgggctccccgtaggcgatgggccccactgtgtggatgacgtctacggggggcgacggggtcagaccggcgggggtctacgcggtcctcagctccctcgcttccccctgccggcctgggcagaagggggcaggaaacacctttccccccaagcgctgagcctcctccgcgaaggcccccacccctgtgggccccctcgagcccgaatccgcacgcgcacagagccccgcgccccctccccacatctgtatgggcccggctgagacccgagcgcgagtgtgggcgcgaaggcgttgccccccagctccatcctcagcctccacgcacggtctcccccatgtgcttcctggggtgtgcggggtgggggccgggtcttggcccttaaggttaagaagggccccctgaggagttccccagcactcctgtgggggccgcacccctgatgtcccagtgacacacgggcgccctgtctgcgccccacagctgggggcgcgtcggggactcacacttggccgggagccgatagccgccggtgatcttggccttgccagtcttacagctctgcagggtccggcactcgtcggtaagcagggggccggcggcccgatgaatgcagccgtccactgcgggaagggcgggcgcgactgagctggcctggcaaggctgcggccccggggtgagcaccctcagtcccgagaagcccctcggcgatgcgaggacccatgcggagccgcgccccaaccccgtggcctccggccgcggccgctgcccccacccccgcccggaatgtttcacatctggggaaaccgaggcgcagagcgggacggccctgggcctggcgggaagtcgcgcaaggaggccggcagggggcgcacccggcccaccctgtcccttccaggccgcgccgccagggcccaggcagggcggctccgggaggcgggggccgccgggacaggaaccgccgcccgagccggggtgacggggaagcttcctccccgacgcccctccctagccctgtcccgggcgcgctgcagggcccgcgaccagtcgctgcctccgcccgggcctcagcgtcggtgcgatcccaaggcccacctccccaggcggcgccccatcacggggcggcggcaaaccctaggacccattttgcggatgaggaaaccgaggccaccttgttacagggtgatcagatctgtagctggagtctgggtcttccagccgcgcggggaggtgagcccgacgcccgggcccgagtctcctggcgcgcaaaccccagctggttaatgaaccgcctcgttagcgcatccagcttaattacggccccgcatgggcttgtttatccgagggcggctgcagggcctcgcgagcgaccctggggacccgggcgcagataaacaaccggggcgcagcgggaggcatggaggaaacgctccagcagcccaacctcgccagggcaccgcgcaggagaggcgcggcctcaggcaggcctgggtccagcccgggctcacccctcatcggctgtgagatcctgccccttcccctctctggcgtccaccctcttatctggaataccgggacagcgaccctcccacagaggaaaacgccgcgtgctggccgggaggacagggcccatctttggcagctctgatcgcccacgccaggagctcctcaggcaccagctgcctggtgctcacaggcgggcatcaagagaggaccatcattccccattttacagatggacaaaccaaggccaccttctccttcatcacctcagtctcggcacagttccagggatgccaggtagctcacacccctttcttttgctgtttgatctcgtgccctgggggcacaattaaacctcattctgcaactttactcagagctggcaccaggcaatttcccagagcgtcccagggatgggtgggcagagaggttaggggaacgctgagaacggctcaggcctggatcccttccacctgctcctctcctctgcagggagaaaggcagctgtagcccagggcgaggctgagatggagcaagaaggcagggcccagagcgggcgtccaggctggagctcccagtgctgggaagtgagtgttccgaatggggtgccgtggctgggctgtggagctgggcaacgtgagttcacatcctggctctgccagccacagatgtgtgacccctcacatatcatttaacctctctgggtctcagttgctccatctggaaaatgggataatagcacccacctcagagctcattgggctgttggaaggattgagttaaactaactttgtaatgtgcttaaggcagtgcttggcaagaatggaggtcatgagtgtatcctgttattaacaacagtgtgacagtgtgggcatgttcgggtatgtgtacatcagtgtgatgggaggtgggtgcacacagggtgttcacagtgtgtgggggtgagcccagggatctgtctgagctggctctcctaggagcctcccgggtcgagcacctggcaccggctgctcgaagtctctgggggctcaccgccctgcaggcgacctcggccagctgtgggggcccgtgcggggaagtggagctcagtgtttcaggaatttaatgtttcctgcggaagtggactggcctgcagccaggcctttggggctgacctgggggcgcaagggaggtggagggagctggaatcaatgctggcagagggctcaggccagatgccccctcctcacccccagcagttccagaacagggcctgggccaggtgatggctctgcaggggccccagggaggggctcccctaaagcagagatgagggacaggtcactgtcagcccactgctaccccaacaagctagagtgcagcctggcccctcttgcctgcgtgtccctccctgtccacacaccagccttctcgctctctcccctgagagtgcagaggggaacccccccaccctgctctccttagccataggcccaaaggacccctcccacacacactcccagagtccccttagctctgccctccaggccctgtcctggctcttacctggggctaagctaggtcctagagactcaagcttcctggggtcccattcaggggagatgcccttccttccctcttccctcttcccaccccaccccaaggcagctggaaaagaccagcagccctgatccctggggctacctggtggaggtggggtattcccagttcacaggagctgaccaacccttagtctcctctccagggccctcagccaccaaaacaaacctccaggctccagctcaaccctcaccccaagtcagcagaaaacctggggtctttcctggggaggcagagcccacttgggtggcgggacccccctgagatgtttctccatcaggtcaaagatgaagccttcctccacctgtggccagaagatggcccctaaggcccctctgcctcctccctgcagccccttcttccctccaccctcctctaccgttaaactccccctgatatggctccttcatatcagccctctgtctcactatatcatccaggctggagtgcagtggtgcaatcttggctcactgcaacctctgcctcctgggttcaagtgattcttatgcctcagcctcccgagtagctgagcttacaggggcgcaccactatgcccagctgattttttgtatttttagtagagatggggtttcaccatgttgcccaggctggtcttgaactcctgacctcaagtgatccacccgtctcagcctcccaaagtgctgggattacagatgtgagcctgtgtttttttgagacagggtcttgctatgttgccctgcctaagcctcctaagtagctggtatgactcaccccccatggcctttgtcagccttcttgttgggtaagcacctgcgtggtgatttacagccgctgtcttattatttttcctgtttatagaagaagaaactgaggcacagagagcaaaacttgcccacacggctggaaggttgggctcccaacctcagtggctctgcttcctctgggaccactaaagggcctcgccctgaaccactctggctgactggtttgaatggccccctgtccacgctcttggggaggcagtgtctccccacatcagcacgtccccttccagcaggggggctgccctggtggcctcttgttgcacagtgttctgaggccactgtctttctggacggtttggctgcccccagcgctgacggctccctccatccagcgggacttcccgtctccttcgtgggctctcgttcctcaggccgctcctcaaatgccactggggctctgcctgccctcgcctgagcccggaggaacctctttctgccccaagccctggcctctgagcggcccttgaccctccgccccatcttaggcatctccctgctttgctgtggtaaagccctgccttccagcctccacggccagcattcagcccagcatctgtgcgcctcccatggaaggatgttgtggaaggaaggagggctgggctgagtgattgcccatggccctgggcattcctggggcagtggagggcaccaggagtgggcagtcctcagagccagcagaggcggaaggcaggcaggctccggtggggccatccgccaaggcgcttaggatgagttggccgctatttagggtgctgtaatatgcatgaagggaagattagatatttaaatttattcagcaataaatgcatctcagtgggggagcattcctcatgctaaacaaacaagcaggcaggggctaattaattatttacaggaacataaggaggcctgtggcccacaggaccaggagggcagctgtgcccctaccgagggcagggcaccccaacccgcaggcctggacctgctcctggtctctctctgctcccccattccccctaccatcccgtggggctggcccacgctgtgccctctttgggatttctcttcccagaattcctggccacgagattgctggtggtttggggcaagtcacttaacctctctgagtctcagagctctggcctccagagactggtgggggctgggaggggtgactcatgcctgtaatctcagcactttgggaggctgaggtgggagggtcacttgagctcaggagttcgagaccagcctggacaacatagtaagaccccatctcaaagaaaagaaaaaagagtggtggggagcactgagatatgctggaaggtgtcaagggggatgggagactgagggccaggggggttaagcaacctgtccaaggccccacagtgagaggaggagcagaaactaagatccactttatttatttatttatttatttattgagacagttttttgctcgttgcccaggctggagtgcaatggcatgatctcagctcactgcaacctccgcctcccgggttcaagcaattctcctgcctcagcctcctgagtagctgggattacaggcgtgtgccatgatgcctggctagtttttgtatttttagtagaggtggggttttgccatgttggccaggctggtcttgaactcctgaccttgtgatccgcccgcctcggcctcccaaagtgctgggattataggcgtgagccaccgcgcccggccaagacccacattattaaccctcatcgtacagaagtagtgataggctcagagaggcaaagccactttcccagagccacacagcaaagtgtaaggccttgcctgggcagctcttgcccctggcccccaccttcctagactcctgtgggccccaagagcagggaggtgaacaggaaggggggcctgggcaaggttgtgggggtgagtggggcctgggctggctgggtgtccagcctgctgccctgtgactgcagcgtctggccctgcctctcaggtgccgagtctcatacctctctggctcaacctcacgcctctgaaatgagcttttgggggctgtatgggaggatcccctttttacagatgggaggctgaggctcagccatggacttcacaggcaggggattcctttgccctgtcatgcttttgggggccttgtaccccagggactggctgcactgccagggtggagatgcccctgagaaggcaggcaggagggctggagacagagggccttggggaggcagaggtgtgagctggggtttgagggaggggtgtgtctcccctccagcccaggaaggaccaggggtctgggctccagggaccactcccgcctggacgggctgggcacagcctggagggcattggcagccaagcctcggtgcagcccatgctggtttccctctctggaggagggctacagaaataccagatgccaaggcagaaagggacaaggctcccggggaaatgggggaaactgagtctctgagagggtaccaactgcgtcaagggcagacatctgacttgctgccccaggcttctaaccctgcagagggaaggtttagccacaaagaccggataagtgacctacccaagggtcttgcgctctcttctctcccagcccactcctcattctccacctctggcttctattcaactaggccaagacctgagcgatatcccattgccggaaccatctttgcttctgctcacaccctcctggtcggccattcaatcaacaaactctagccagccccggctctgtgctaggcttgagctcagcccagcagggtgcagagcccatcctcaccaggccccaccctctcggtgccaaggcgggtgggtgcccgggggagaagatggatggacgacagttctgtgatgagatctgaaattcattacggggtgagatcagctccttaaatggggatttgaaaacattagggcttcattatgtacacaacggcagtgcctcattcatcatgcaaaaatcactcccgttattaaaaatccctgtggcagctgcatgccggggcttggtggcatcgtgcctgctggggacagagcaggagctccacagccctgcctggtcaaagttgtggccacgggacaggggccccaagtcccagcctccctcttacacaggggccagctgcggggtggggcgggaagtgaggttcagctccagggacttagtgcctcagtttctccacctgcaaaatggagacgctaatgatgcctcccatagggcggggtgagggtgtatgagattcttcagggagaggttcaaagggtgctggtggccatgtcgtaagtactgagaatgcctggctgccgttggcaccatcatcaactggggtcaggcaggggtggcaggaaggcctgggggcctttccttggggaagggcacgcatcccctgtcataaaacctcccatggctcccaagagtacatggaataaaatcctcaactccaacaaagctttcctggactctctggggctccctgcagcctccctctcagatgaattcactgcctcccgcgcccctcctactggttccaaactctaccattcaaaaaatgcgtacgagggctcgggggcgacgtgccacgtgccagccctatgcaagggccaggagtcctgtggccgcagcagttctagggacgggacacgcggctctaagttgtgggcgtggtgaaaaaggagaaggggaaaatggagctggccccgaggaaggagggagggatgggcgccgttcagaggatgaggtggcccctccgaggaggtggcattggagcagagccctgagtaatgagaaagaactggctttggaaggagatggggaggagagtccgggatgagagtccgggcggagagctcaggaagggcagagccctgtggcaggaacaggccggcgggtgaggctgggagggagcgctgcctctacaggacctcccgggaggtgcgaggagtcgagcaattgggaattgattcgagcgcggtgggaagtttccatcagtgaagggacgtgttctggttcggcctctggaccctcttctgttccctcttctggacacgcccttcccttctatgctgaagcacagccccctcccccctcgccctttgccagacagccccacgccagagggtcccggcacgcccaccctgcacacacaacacccaccagactggcacagggacaggtgcggggactgcccagcccttccggctgcctgctgcttctgagctcagccctgctggggaggggagggccgcacacagccccgcctccagagggccgaggctggccacaggccacggaggtcacgtttatctgctcgcagagcaaggccacggctaatcggagcggccggagctgagccttttcctagcggccgcgggaagcaatcacggattagcagcggccgggcgatgggagatagcgccagagcagggcgcggagcgcttgtgagccgggcaggagtcgagcgctgaatacttagaggcctgggcgaatcctcccgggcctgcgggtctacgaacagagaaccagccagagccagagagaaagaacgacaggagaagggagagggagccagggagaggcaaagcgtggagggagaaatggagaaaacgagggagagagggaggtggcaagagaaagaggtgagggagagaggcagggttgtgggggagagcgctcggctggcccccagggtcccagcatgtgtgtgaggagggaccggccctgggtggcggcttctgagcaggtgagggagtctgcggtggggcctggggagaggcgcccagggttagggtgcgggcgcgggacagggagtgttgtccacctggcagaccttcactaaatgcagcagtggagggggtgtcggaggggctgccctgacatgggaaggtgaaactaggcgggagggttgcgacaggagggcagaggagcgctcgggcccgggagcagcatgtgcaaaggcccggtgctaggggaagacagtgagggaagcccagccaccctagcttctcttgggcggtgtaggagacacacacacgggcttgccctgccagcacagggtgcagaggtgctcagggccgacggcatgggggcaggggcagctgcacccacacaggcaggctcggctcctgcagtttgagcggggtcgctaacctcaggaaggccccagacagaatgtggggaggttggggatggggttccatcctctcctgcccgcctgccagggacctgcctgactccctcccacccatgccaggagctgaccctttggggcgctggccaggccggagtagagatggcggccacgcagccagaggaaggcggccctgaattaatctgtcactaaagcttggccgtggcaggcgcagtcatgatttagatgaataattgaaacgctcggatacatttattatccctttagtgcaaaagtggcagagaaagacgaggggtaattgaaaaagagcgcacaaatctccccgagaaagccggctccttatctccgagtaaacatttcagtcctaataaacaggagagacacgggcgtcagggctctgtcgattcccatcctgatttaggacctgcctcccttcttaccatacaataggagagtgttttaaaaaatgtttttattgagccagtaaaagctttccaggagggaggtgggagagaggagggggcctggcagacaccaggccaaagggtctgtcgggaaggctggcagctgccccaagcccatcaagccttcctgaagcagacacaggccttccccctggggggcccgtccatcctgctctacctgcagaactcctatttagccttcgggacccaagtcaaatgctccctctgctgggaagcctcctaccaaactgggtctccctgaaggcagagccaagccctgagtcccagcatttggcatagctccctcaactcagagagagctccagggaagaatgggtagtaagggagtagggggacttccccaggactcactgcattgccagcaccatctagttcggccccagggtgtggtgggtgggggtccaggcccagagtgaggcaggcacaggagtcctgtgccctccaggttaagtccctttagccccagcagcccctgggggctctcactgcattgggggtgcccgggagactcccttctctgctcccctgagactgcagccctcttctgctctaaatcaccgcacatttgccgtaaaaacagtgggctcgggccccaaagccctgcaggccagtcccagccccatcttctgagccccagttgcgccggcccctcctggcaggaactccacgccactacccacaccagggtgttggccggggtgttggctgggatgttggttgggttgttgcctggggtattggttggggtgttggttggggtgttggctgggttgttggttggggtgttggctggggtgttggctggggtgttgcccagggtgttggttggggtgttggttggggggttggctggggtgttggttggggggttggttggggtgttggttgaagtgttgcctggggtgttggttggtgtgttggctggggtgttggttggcatattggttggggtgttgcccagagtgttagctggggtgttggttggggtgctggctggcatgttggttggggtgttggctggcatgttggggtgttggagtgttggctggtatgttgtttggggtgttggttggggtgttggttggagtgttggttggagtgttggctgggatgttggctggggtgttgaccggggtgttggctggagtgttggttgagatgttggctgacatgttggggtgttggttggggtgctggctggcatgttggttggggtgttggctggggtgttggttggggtgttggttggtgtgttggttggggcgttggctggcatgttggttggcatgtgttggttgggatgttggctggcatgttgattggggtgttggctgccatgttgcttgaggtgttggctggggtgttggttggagtgttgtttggggtgttagttggggtgctggctggtgtgttggttggggtgttggctggcatgttggctggcatgttggttggggtgttggttggcatgttggttggggtgttggctggcatattggttggcacgagttggttggggtgtttgggatgttggctggcatgttggttggggtattggttggggtgttggcttgcatgttggctggagtgttggttggggtgtttgctggtgtattgtttggggtgttggctggcatgttggttggggtgttggccagggtgttggctggcatgttggttggggtgttggctggcatgttggttggcatgtgttggttggggtgttggttgggatgttggctggtgtgttggttgaggtgttggttgggatgttggctggcgtgttggctggcatgttggttggggtgttgaagtgttggctggggtgttggttggcatgttggttggggtgttggctggcatattggttggcacgagttggttggggtgttaggatgctggttggcatgttggttggggtatttgttggggtgttggctggcgtgttggctggggtgttggttggggtgttggttggggtgtttgctggtgtattgtttggggtgttggctggcatgctggttggggtgttggctggcatgttgttggggtgttggctggcatgttggttgggctgttggctaggatgctgattggggtgttggccagggtgttgcctgctgcccctctccattgagggactggcagactggcagtccccagggtgaggggatgggatgtgggtgccagactgagagctgtgtccctggctcccagggcacacagagggtgccactcactgcaccacagatgttaattatttacttcaaagcaggaagctcttctaggagctcagaatctcccataaccctgccctcgggggagtccattccggtggggaggcaggcaatgaagaacaaacacaaaacgcaagcagggaatcagggctgcgggacgaagacatggagcagggcagtgcatcagggttctgggcagagtggccagggcaggcaggatggcccttgtgcgtgttcgaacaatgggtggctggtcatgggaggggcgcgggtagaggcctgaactcctgtaggagggatgtccagggaccccacgggaagatgggtgtgtctgggcagagtcagatggggtctaacttgggcaggtaggcgattaggactggatgaactcaaaggatggtgggaggagcaggggtataggggagggcagagcacctccggggaccaggctgggctccattccagccccagcatcgtccctaccacagccccctccccaccacctccactgtgttccaatcacattagcagagtgacagtcccagcaagtgctggcggcggctccataaatctcagcccatgttaaaaggttggactccgggcccacttcctccaggggcacccgccccgtccatctctccatcagtcaggttgtgtgagaggcctgtgccagccgctccgcacccctaaatgctggaaggagaaccagagagacctctgccatgcctctgagtggccagggcagggcccctccacttcctagagtgaggtcacaggccatctgtgagccactcctggatttgccaaaacatctttggtttccaccagctgcccttgggtaagtccgttgcttaatgtgtagggtcatctccacctttacctgtagttcattcattcaataaactttttttttttttgagacagggtctcgctgtgttacccaagctggagtgcagtggtgtgatcttggctcactgcagcccctgcctatggggttcaagcaattctcctgcctcagccttctgagtagctgggattacaggtgtgtaccaccatgcccagctaatttttgtatttttagtagagacggggcttcaccatgttggctaggcttgtcttgaactcctgacctcgtgatctgcccacttcagcctcccaaagaactggaattacaggtgtgagccaccgctcctggccttaatttttatatttttagtagagacagggtttcaccatgttggccaggctggtctcgaactcttgacctgaggtgatccacctgccttggcctcccaaagtgctgggattacaggcatgagccaccatgcccggccccttgttccttgttttttgagacagggtctaactctgtcaccctggctggagggcagtggcgcaatcatggctcactgcagccttaaccgcccgggctcaagtgatcctcctacctcagcctcccaagctatgactacaggcacacatgctagcatggttagttgatttttttttgtagagatggggtcttactatgttccccaggctggtctcaaattcctgggctcaagcaatcctcctgcctcggcctcccaaagtgctaggattataggctgggattacaaacatttactgagcacttattataagtgccagccccagatacagtctttcattttcagggggtagaagacaaggaacacaatatgtaagtaaattatacagcacattagaaggagacaggtgctcagaaaagttaaaaccacagcagggtgggggccgggggagtgccagcatggggcaggggaggcagctgcaatttcagctaggggccagggtggacccccctgagagatggtattcaagtcaaggcctgtcggagtgaacggagcagccgcgtggacaactggagcaagggcattgcaggcagaaggaactgccagggcaaaggcccggaggcaggagtgggcggggcctgtccagggaggccagggtggccggagcaaagtggagagggtggcagtgcggaggtgactgtgagaggtgactggggacctaacgggccatgctaaggaacttggcctaggccctgagtgagacaagaaccctggcagggtggtgggcagaagagactcgatgagctgatgtgggacagaaaggcccaccccctttgtgatcctttatcttcctgaactgaatggctaaagatctcgctcctcacaggctgtctgggatcctgggccatctcccatctccccacctcttggctgggctccagtcattcctgtgtcagagcctccctctcctccacttccaggcctttgcctgcgctgttccctctgcccgggacacccttcccagcactcttcgctgggctcatgcctacgcatccctcagattgcagaggaggcaccacctccttctagaagccttcctgatgcccaagcagggacaggcactcctcatcaagctcctatggtgccactcccacccccacccccacaccacagatcaccctgtgtcttggtggtgctctcatctgcactgggagctcaggggacagggaccaggcccatctgtgcccggcagtacctgtcctggcacccagctcggggcccggcacacaggggtgatcaatgaacggaggaagggcagggtgctgtgggtgggacatgcaggtgtcaggtctgcaaagtgtcctccaaaaggacaggcttcggaagagggtcctaggtggtctgttttcaggaccacagtccccggcaaagcccctcattctgtgaggcctctggggagctgtgacctccatggggacagctagaggagaatggggaggagggaaaacatctcagccacaaacagacccccattctgcatcctggctggtcaccgacagctcttaatgctgctcttatttattcctgacctttatgccccttttatttttcccccttttaaaacctggcctgggccctgccaccgctgccgtaaacacggcccccgggatttatccgacggcacattaacccctggcccctagctcaccaatcatcctgctgcctgtgcagacagcgggcagcctggccagctggggggctgcaggactgggctgaggggctggtgtggtctgccctaggtgggctggccatggaggcaggtgctgggggtacagggacacgcccgcttggtatctgtgacctggcctgtatcccttgcggccaggcccaccctgacctctgacctcctgcctgcctggcccttccagaacccctgctccgtggtggtcgttaacaatggcagacacagagacatcccagggctgagagctggcagctctctccctgactttgtgagacctgtcctggctgcggagcccgaggtccaagggcagggtagagatgataattttgccctcacaggtggggaaactgaggccaaaagggacagagctgcccaaggtcacagggagatcaaggtcagggctgggttttttccaccacacttgtggcccctgcccagttacagagcaggaggcctgcattcagaggggtggggagctggcccaggttgcctggtggtgagggtgccaggcctgccatccaggtctccagctctggggaagggaggcaccctgtgaggacagtggggaaggtggattgcagtgagatgggcaccgagggcgaggggcaggggaggagcagacccagcaggggagatgccacaccccacccccaccaagacagaaggtccactcaccgccaccgcctccgagcagggagctgttggctgcaagagagagagacaaaggcagatcagtggggaaggggctgcggcgggagtatcagccttgaggggagggtgatgtcaagatgggagtgggctgccagctaggtcttcagacttgggcacagggtcttcccagtcctccggggcggtagtagacgatggtgaagagggaggaggttcttcatggtcctggggtttgtagggtggtagggctggggacacaggagagctatcagggcctgcctgctcacccggacgcagacgcatgggggggtccagagaggcagatggcccccgccacggccctttcattccttcactgtttcgcccacagtatctcctgaggctggtcggcgccaggcctggtgcagagatgtggggaggaaaggacaggtccccttccccagggctcacagcttccggcagggcatagccttgaagccactaggaagcaaactgcacctttgcaaccgggctaagcgctgcccagggccagagctggaggactgagaacgcggagcagtgctgagggggcgcagaagggggcaggggcgggggcgtccaactgcgagagggacaaggcgagccgggtaaggggcctggagcgctgccactggagccaaaaccagatcaacagcggggtgactggggccatgtggcttcgtgcctcattttccccatgtgggagaatagccccacctcaccagctggtgtgaaggtcaatggagaggggtcctcaactctgagccccgctgcaggaagacctgggtccccgccccctccttggactaggggtagtgctgccaggcagagctggactgacggctttgtggctgccaccttcctgcgcacagccctgtctgtctcagtctgtccgatcggctgcccctcgccaccatgcagctgacacgggggcaaagtgaggctggcagcccctctctgtaggaatgccagagctgtgcatgccagcactgcccccagcctgggctccagccccgatccgcagcctgcgtccgtggtaactgccagagctcatcagggaaagcagcgggtgaggccaggcaggtgccgcccaggcccagatgctgcccaggtgggaggccagctgcgcccgcccctctgccgaggagtcctggctcccagacagggccttcagctctgcacacagctttgctacccaccccatctgcccagaccattgcagccctttctgtagaaaggatgaggggacacagagctgagctgggtggccaggctgcaggcccaagatgccgtgaggacggcatggacgctgctaagtggtgtcgggcggctccgagtggctggtctcccagagctgacagctcttcgcttggggaataattaattccaccgcccaaaaacccagggctgcaagttgccatgttacttgcgagattaatacaagcagctaattaagatggagaggcgaggagcggctgggcgctcccaaagcaggggtgggggccgcgggaagtgagggggaggtgagctgagtggtgccagcgaggcagtgggagcatgagccgaagccggagctggagctggagggagagcaggacacggaccacaatggggtgcccaggctggcccaggacaggctgcagaggggcgggccccccagtgactctgggtggggcctgtgcccacaaatgcacatttctttctttctttctttctttctttttgagatggagtctggctctgtggcccaggctggagtgcagtggcaccatctcggctcgctgcaacctccacctcccaggttcaagtgattctcctgcctcagcctcctgagtagctgggactacaggcatgcgccaccacacccggctaattttttgtatttttggtagagactggttttcaccatgttggtcaagctggtatcgtactcctgacctcaagtgatccacccgccacggcctcccaaagtgctgggattacaggtgtgagccaccgcgcctgggcatgaatgtacatttctgctgaccaagactatttgctgggtgtagacggggtgctgggcacagatgggcccatttattatcataacaaagccacaagggaggtgcgatggttcccattttacagagaaggagactgaggcttagggagcttcagtcatggggtggcagcagcagaattggaagagtctgtctgactccaaagccaagccacgaagccagctgaccccagggacactgtctgagggtcggtcagagggactgcctttccctggccaggggtggggcttgccttctcgaaaccaggcagagtaccccgcaagccccagatgcagcctccacccactccccaccccagcaggtccagctgcagaggcgagggctgggcatctgggcagtgccaccccagagccagcgagggaggagggggcatctcaggtctcggtccagctccaggccccttggcctgggcagtcctggcagcggtcggcagctgccctcctcgggacccccccacctccccccatcacctctctctcttaattaacaccggccacaaatgagctggctcctgctcaaagagggcactgtgccaaataggttggcagcgagcctcgaaggggtggtaggggagggttgctgacctgctgttctgcagtcccctgtgggaaggtgatgccattcccctgcccacctggcgcccccaaactccactgtgtgtggcctgcactgcacccggcaaggtgagtggggtgaactgacctgacgccaacccggccagagcctgaggagggggtgagctgggggcagagggaagactttgctgggtggagctgggggaggccaggccaggagatgggatttgccacaggcaggagagtggctgcggcccagtgctgggggctcagacttggatgcacggaggacctggtcccaggccacccacgcacagtgggtgccccgggaggccagtctactgtgcccccttctctagccccctgtgcctgacgtcccacgggtgggggggctctgggggtcaggtggccaacctggtggctgggacccagttcctcagctcctcctttccctgggcccccgttctggcccctgggcctcgacaccaagccacatggttcccccataaagctgcctccaaggccggagagctgggccaggctgtgcaggggaatggcccggaggcttgcagagaagagcctagggaggctgtgccagccaatgccaacagacaggcttctgggtgtggccacccagcccgcccagcccagggcagggcctctcaggtctccctgctcctcaggcctccgtgcaccccaacatcttggcctgtggccggcccttttcacctcagctagttcctggccaccggcttgagcctctaagtcccctctctactgcaccacccccctcagtttgctgggaggctctggtccttacacaacaagtcatcaacccagtttccagaggaggaaactgaggctcacagagtacccggggactgggggagatgcaggtgggcccaggagcactggttgtcacagctccttttcttgacccccaacatgcccacctcaaagggctcttcttgctgaaggcgtggtggcttcaggcgggcagtggctgtgtgaggtgggggatgggcactggactgcgagtccaagctggggctcatgatccagccccacccaagggacccagacctgctcccagcaaacaggggcctttgaacgccatgtggggctgagtgggggacccgagcctggacctgggagcttggagcggcacagttcgctttggctctgggtgggggcggggcctcccggcagcaagcacaccctggaggctgtggagtgccctagtctgtggtctgctcttggagtcacctgtaggcccccactgcaggccgaggtggcccggccccatcgggttccccccgcccgaggacatgcctgcgccatgctccctgggacttgattaactggctctgagcccggtgctgcgcctgtgaccttggggtggcacccctcaatgccagtcactgccaagtcctctgtccgctgctggcggtccctggggactgggggcctggaaacctcagtctccgactcccacacacccctcctcccggccctcctctgccccagcacttgctgtccctgagggcaggtgcagtagctccccagtttgtgcccctgctcccagcctagttagaggctagcaggtggccgctgtccagcgaaagggagagggccagacctgagtgctcagaaacgacaggtcacaggaggcccgaggcacaggtggcacccggcccctcctccatgctccacacaaaacatttgaattcagtgccagttgggtgccagggttgtgctgggcagcaggcacagagaaaagaacagtatggagtccctgggccttggaagcttccagtcctgaccggaggggtagctgggagcaggcttgagagctgccccgggcgtgctaaatgctgtggcgaggggaatgggggcgtgtgggatctactgaagtctgcagactgggaaggcttctcggaggaggtggcatttgagctgaggcttgaaggataagaaggaaaggcatggagggaggggcacggggacgtgcatgatgagggcaccctaccagccaacacctcactgagagggcagcgccagcctcctagggcccaggcagggccagcctccctgctgggcacagtagacacgtgcttagggcccatgacacttttaggggcccacaaagatgttgcagttcttttaaaatcagaagaaaacaatgaacttttaggtcaaagacaatgttatcagatataatattaatacatttgtcttgatgctaaccaagtcataaaatataatttaagatatgttttatggaggaaagggaccaacaaggtggaatgcctgggcccaggctgggtaagcttggtgcatgcacagctcatttaatcctttccctgtctggaagacgtgtttacagacctgttttacagatgaggacgctgagacacggaaagtgatcctctcacaatgtacatttggagaggaggtaaaatctcctattttgccccagctgccctatgaaaaccctcccagtagggaaccctgggggacttgggagccttagtgagaaatgagaaatccctttgctcttaggataaagactggctccttgcagacccccaggccccatcgaccatctcctccccttctcctctccctctgccgtacatatggtcctcaaacttgccccatgctctccagccccagacccttttcatagactctgccatggcccctctgcctggaggagaccctcatcatctgccacctcctcaggtctcctggcccccggtgatgctctcctgggggggccatgaatcactatcactgcctccagaatcccctcccaggtgcctatcttttttttggaaatgaagtctcactgtcgctcaggctggagtgctgtggttcgatctcggttcactgcaaccactgcctccagggttcaagtgattctcccacttcagcctcctgagtagctgaaagtctaggtgcgagccaccatgcctggctaattttttttatttttagagacggggtttcaccatgttggccaggctggtctcgaactcctgagctcaggtgatccacccacctcggtctcccaaagcgctaggattacaggtgtgagtcacggcgcccggcccccaggtgcttatcttgatacccccactcctgccctcgggtgtctccctcatggttcttccccggctctcagcacagcgcctggctcacagcaggtgcccactaatgagttcctgaaggagcccgtggacattacagatggtgcccagagtcactcagctggatttaagctgggtctgcctgcctgactcccaagctccagctctctaccatgggccatgcaggggagcccaccctggggcccttgggaggcaggacctgggccgggagctgtgtaggcgacaggggctgctccaagggcagtggcaggaggccagagccacgaaggtgctcaggtgcaggaactgcctctgctgttcccctgacagggacgaaatcctccagcccagggaggggggctgccgagggcggtgaggggtgctgtgtgggggccgggacatcagaggagacgcagtgacccaaggaaagcgctgagcaggttcctgggccagggagaggctgggcgagcaggcacagaggtgactttgaggcgggcacagcccacctgcatgtccctggaggccgcctccactccccctgcttgctgctctgggcctcaccctggcctcagctgcctggaggggccccagccaggagttgggggggtgggggctgctcccctaagtcacccagcgtcctggcctggccttcattctcctcttccccttgtgagccggatctcagccttctgttctctgacaagtgtgcagccagccccaccgtgtgccaggcgctgggacacggatggggcagccctgctggcacgtgcatcatctggctgggagaccatcaggaaagacagcacgagaatcaacttgcacaagaatccctgtgagtgccagaggccgagaaggaaatgcaagggagtggcagggggccggggggggggggggggggtgtgaggtggcggcgggcagtggatctggaggggtgggtggggcctgctgaaccctggagctggtgtgagcagcacagccaggcaggggtgggggacgaggagcaaaggccttgagacctcaggggctgaggagcagggaaggaggacagaagtgagggggctcaggcaagagcagcccctggggggccttgagagccttagtgagaaatgggagctgctggggggtttagacagaggagggatgaaccgcacagggaagggactgggggcacaggcagtggcaggaggggcctcctggctactgcagtgtccgggtgacccctgcctccgggatgcctctcagacttcccctggggatagcaagcctccttggtgctcccacaaagtgtgtccccagcatcctcctcaccctccccgagctcagatccccgccatcagcacagagcctggcacctccaaggggctccatgactgccaactgtcccagcatctgaccagctggcaggcctggccccacagggggcttaggggagcggagtttgttcttggaaatcgatgccccacttcctgcaggccagcggtgggtatccgtgtgacttgagggcgagtcgtttaaaacatgttttagattagaaacaccccgcagatggaataacatgtgaaatgtgctggattttgaagataaaataagagacttcaaaggcccctcaagctgtgagagcagttgcttgtttgacaagctctgtccccccaggccaaggtcactgtcctccgtggtagggcggcccaggtggaaggtgggagacttcctggacattttccaggctggggagccaggggagcaggggcctcactggagggtgagggctcccatttatgggcaccaagtgcatccccagcaagcttccacatggatttttttttttttttttttttttttgagatggagcccaggctggagcacagtagtgcgatctcagctcactgcaacctctgcctcctgggttcaagagattctcctgcctcagcctcccgagtagctgggactacaggcatgtgccaccacgccgggctaattttgctatttttagtacaattggggtttcaccatgttggccaggctggtctcaaattcctgatatcaagtgatccatctgccttagcctcccaaagtgctgggattacaggtgagccaccacgcctggcctccacatggatctttgaccatcatctttgcacacaccctcctgtcccacttacagatggggaaactgaggcccagagaagagaaatgacttgcctaaggccacagacttcagtgggaggagccaacagtcttatgctttgccagccctggtcctgaaacccccagctgtgatctcgggtcagctgccccacctcctggggcctcagtttcctcatctgtagggggggtgatcatttaactgaggcccttgtgaggcatagatgataaagttaaaaatgcccgtaaaacctacagcctcacagggcttcactgtggcagtgggccccgaagctgggtgggggcggttcctgggggcagaaggtcccagcactcctggtaagtcagggagaaggatttgaaccccgctgctccagggctaagcccctcaccacgtcttctctgacgagcctgggagctgctcaaagctgctggggtggtacccagctgggcatccccactagattcccctgggtctcctccttcccactgggcccattccaggccctcctttccccgactcccctgtacctcagagcggcctccttcactcccacacacctccaggtgccccctgcctgtttgcccacgtccactccactctatagcccctcttcctggtctaatcgaggcatcccacccccacgcctctccccataaaagcctcacagttcactgtttgaaatggcgtggctgcggttccagctggcctgggcctctcttgtctgcttcctgcctgggtttcttgggctctgtctgcctggctgcctgggcccctggagacccaagctcctggccagtctcaccccaagctgtcccctaaacccctggcaacatggaggtccccctcaacaccccctctccaagccctgtccccaggcaccttccacttattgctattttcctaagtaaaaaattcatgttcattccaccaaatggaataccatgagcatgcaacacaaaaacaagagaaacgcaagtcagctgctcgctcatggcgcagactcggctcgccccattcccatggccctgaaggaccttccagactttaaaacgaaacaaaaaatagctgatgacacatttatcaaataagttctccgtgctttgcattgggccaagtatttccagtggcttctttcatttcgccctccccacaagagcccgttgagggggtcctatgatttttcccactttacagatgagaaaatagaggttcgcagaggctgagtgacttgcccaaggtcatgcagctggggagtggggagctgggtctgaattgggctgtctgacttccatgggaggactgagctgctgcactgcaggacccccagctgctgcctgggcctcccctctcctgggcgccatggggcaggcactcagcatcccacattagcataaccataagcatccctgaaactcaattaccaggagatggcttgggccccagccagccgggcagtctccatccttgcaagaatgaggggctggtgatccagggagccttggcgggtgggagggtggagggcatcagagaagatgagggaggagttggggggccttaggacggccatggacccctcagtctgtgggtcttgaaggcagccttgacccctaggaaaggtcaaggcccagccccagctgggcaggcccgactgccccgtaggaaaagtcacgggttcctctgcacccagcttgctgggtgaccccagaaagccccttgcctctctgtgattcagctttcttctaaaaggagaaaaccagaagctattttattgttctttaatttttaaattttttttgagacagagtctcactctgtcgcccaggctggagtgcagtggtgctacctgggctcactgcaccctccacctcccaggttcaagagattctgccaggcctcagcctcctgagtagctgggactacaggcacacgacaccacacccatctgatttttgtatttttagtagagacggggtttcaccatgttggccaggctagtcttgaactcctgacctcaagtcaaagtactcagattacaggtaggagccaccatacccagctggggctattttagtagaaaacaaagcaggagtttgcacgaggaaagagtgagcaccagctctgaacagccaggccagcctgggctccccctgactcccagatccccatcccaggaggcgtggctgctgtggcctcctacataggcggctcctcagctgcccctcacccctcatgccttcctctcccagcaactgatgagccttttccatgcatttcctgcatggatgaatcaacctcacaaaacagcagaagccccctccctgcagaggtgtccactattctggatttggcatgttattttctttagagttttactatgcgtgcccctcaacaaggtaagataggttctgtgtctttgagttttgtataaacgggagctcccggtttgctgttattattcattgcaatgcttgtaagatttatctgggcaggcccacactgctctcatgggccccccccgctccttttttttttttttcagacggtctcgctctgttgcccagactggagtgagtgcaatggtgggatcatagctcactgcagccatgacctcccgggctcaagagatccttctgcctcagcctcccaagtagctaggactacaggcacacatcaccacatccggctaattttaaaattttcgggccgggcgccgtaactcacacctgtaatcccagcactttgggaggccgaggcgggtatatcacaaggtcaagagttcgagatcagcctggccaacatggtgaaaccccgtctctactaaaaatataaaaatcagctgggcgtggtggtgcgcgccggtaatcccagctactcgggaggctaaggcaggagaattgcttgaatctgggaggcggaggttgcagtgagccgagattgtgccattgcactccagctctgggcaagagagcaagacttatctcgggaaaacaaacaaacaaaaatttcacagagacaggatctccccatgttgcccaggctggtcttgaactcctgggctcaagtgagcctcctgcctcagcctccctaagggctgggattacaggtgtgagccactgcgctcggcctcgtgttcactggtgtttaatgttccatggtggaactaccccacgcccagccacccattctcccactgacccacagtcaagcatgcttggttttgtctcatgcaaacacagtggcagtagcatctttacacgccccatgcacacatgcaccagaatttctcttgggtccacacttaggagtgggctgctgggttgtggagtgcgcatatcttaactttactagttattgccaaattgctctgcaaagtggttgttcagatgatcgtgttaaaatataaattagatcgtgtcacttccctgcttaaaattctccaatagcttccgattatacttagaataaaatccatgcttccctccatggaggcatggctgtaccccacacccctcccccacaatttcctggcctcttttctcttccttcaataggtctggctctttcatgccccagggcctttgcacatacgtttccctctgcctggcacactcttccagctcttcccaagctgagctccttcttatccttcaggactcaatgaaaatgtcacctcctctaaggggctgcccctgaccacccagttaaaaggccttctgccccattccccttatcagcctctttatttcctctggagcccacaccctgtgcccataatgacctcatcctctgatgtgtttgctggtttattaacagcatggcagcctgtggggagacgacctcatttgctttgtacattcctggatcccaaaggccggcatggcctggcacctaagagctcctcttatgactactcattcattcaacagacattgatgaggccaccgatgtcacagagggttagcagtggggaaggggctttgcagaggggagtgtggctgagaggagggcagagaggtgaccaggcccacggggccctccctgatccttctcccacagtcatggggtgtcatggcgggtgctggagctgggagcagcagggttggtcttgccctttagaaagaccccctttagagctggggaagggagcagattgaagaggtggtcctggaggcaggggctgcagggatggtggtggctgaggatgggttgagggagggctgggagaggcggcatgattgagcccatgggaccaaagagaagaccgtggagatgggactggatcaaggatgcgattggctcagaactggctcaatccagtcaatggaagagcacatggtctatgaagacacagtggtagctgtagccccgccaccctcctgcccatgggggcttccaccaccctctgcaggaagctgggaaggggctcattcatgtctagcccacccagaggctcaggtcttaacctctggggttataggttatagcctccccctggcccccagtgaccgctttgaacacttccccagacgctgcctgtaagcactacactcggcctacaatttccgtgggaggatcctcccggggcccccagcaaggagcccttgacctaggttcccctcccccaccacggatttgaaaccgaggccctagaaggaaaggaactggaagaaggtggcacagctgaattgtcactttgctttttagaataggaagtgttgcaccaaggccaaaaacgttcccttctcagtaaagacagaggaaaggcagcagccacttgctgcgcagggaatctaagtcagacaccaggaagcaccgtcctctgcctgccgggcacccgccacctctctgcagccagtggctgctcaccctctgaggctgcccaggactctcaggatgcggggctgggcaggcggaagaagcagttgtgtctgactctaaaactagtgcttccccagtggggagtgctggggaggcgcatgggaagggccgggtggggtggggaccaggccttctagttccctgctgtccccagcgccagggcctgtgctgagggtctggagccgagggggccccttgccctgtgttattacccctcccaggccttgtcctgtggggacacgacaggaccctagcctggtccctgcctgcctgccttagggcccccctggcctgggcgcctcctcttctctgttcccctgccctcccagcttgggctccacgctgcagagggaggagggagagggaggagggaaaacggtggagggaggtgggaggcaggaggcggaaggaaggagcaggaggcaggaggaggtcagtgtggcagccattggtatgcgaggcccggcctcagcccctctgctccctccgcggcccagcctttctgctcagctctttaagaatccctcctcggcagcggcagcgtgctggttgctgggcaaccccatcgcgccccgccccctgccgctggcgctggccctcttcccctccccctcctcccgcagctcctcccagtgcccccagcctcagcggcgctggtgctcctagctcagaacctgccaggcctggctgctgggggcacctgtgcccggcaggtaagtggctttgagtgactacatccagccccagctctggagtacagctctgcctcccaggactcagggagggagaccctgggcttaggacactctttctccttacttccctgcccctggagcacctaggccagcaggcgagggcaggtgaggggtcccagaagatgccatctgtttccgcaaccccagctctgcagccccaggactctgggagagggaccctggactcagggcaccccacctcagactctcccatccccacctccccgccccagggcaccatctgtggccttagctttattggcatctgttgggggacagagacaacccaaggggaagggcgaggagctgcttgagttcccagtgaggtggggagtggccacctgctggggttggttgagccgggtgctgggatgtgggcgctgggcctcaagagcctttgcgctgtgggggaggctgaggccataaagcagctcacacgggcagaggaacgggaggggagatgagggggctgcagagcttggggcccctgaaacaggcatctggcggccggcagaagaggcacagtgacggggtggggggatccccagtagaggtctctgagacaccaatctcagagcctcctgcatcccctacctcgggcagtcacagggaccccgtcccctggctccctgatgtcttggggctgccaccctctctttggatcaggccctacctctcgctcccaatggcatccccttcctcactgtcccgggggtccagcccccatttgcttccacctgccacagactctgcaccatccagaaggcccagtctctctcctggaggcccttcccagcccaccctgcgcagctggcctcgcccccacccccctctcggacccatgcccatgagctgctcgtcacacagccctccctaccctggctgaggctggtgtctccacagggctgtctttcaggacacagttcacatctccttcctgaacttgggatgtgtgtaacaggtgaatgacagctggagtaaaggaaggtctaaatcaccgcaaaaagcatattctctgctgggaatgatcgctgagaagggagggagccgggagaggcagccctgagtgtctggaagggatgggggcaggggaggtgatgtcactggtggggagcagaggaagctcccaagggaaggaggggcccatgagagaagcctggccaccaaccgcctcagtcctgctggggctgggggctgaccagctgacaggtggaacaaccaccccccgggtgacacagtcttgcctttgcccaggcctgcgttcccaccctctctggcgtctgtctccccacccacccaggggcagctggttagacctgatctcccccgtcatgtctccatcaccccccaaactcacacccagactctacccactccccagtagctggatgtgcatctggccccccagaaccccaggagccatcatctccgggcaattcccagttttatgaatcatggttggccttgggacagctccgtcattgttgccttgaagggctctgtcagcctgatgctcgctcctgtttaatgttctgtccattcattcaccacattcaccaatgcctgaccatgctgtccccacatgctggacactgtagcaggggttggggacatgcaggaacccaaataggcccggctgtgccctcaaggtgccgacagtctggtgcagagatgaatactaacaaaacacacatcactggacacaggtgcctgtgattctaagtcacgatactattgtacgtactccccaggaagcaaacacaacgccagagaaaaaatcagccacacccggatcttagagatgtggacatgttggccggtagatgaaaaacgcagtcatagaaatcataagcaatcaccaacgagctgagtgctacaaaacagaagtggaggagggagacagaagaaggtgacctaatcgggaaggtggggttagaagctgggcatggtggcggcacctgcaattccagctactcgggaggctgaggtgggagcatcgcttgagctcaggagttcgaatccagcctgggcaacatagtagatcctgtctcttaaaaaaaaaaaaggaaggtgggtgggtggtggggatgtgggggttagggaggcctttctgatgataggttggccaggctctgggctgatgaggaggagttggttaggactggagaggcggaagggtgcagagaagtaagacccttgtttcaaggcctgggggcaggagcatgctgaagggagggatgaggatgaggaggaggcaggcactggagcagggctggaggggtgctcttgtcctggctggcagcctccccggtgccagtggcctggtctgacctgccttgggcccctccctgctcccagcaccagtcctgggggttgctgacttcaccctacctggctttgtcccttctgtgcctgctccttggggcaccctctctgggactttcctcctgggctggaggtcttgctctctggctctccctgaagctctgcgccagggcccaccctcctggtcctagaccttgtgcttagaggggagaagccccagccctctgtgttgtgcataatggtgggaggggagcacagtggagttagaacttggatcagagaagctgctggagcctgcctgcctgcctgcctgccttcctttttttttttttttttttgtgacgtagtctcactctgtcgcccaggctggagtgcagtggcacaatctctgttcactggcaacctccgcctcccaggttcaagtgattctcctgcctcagccttcccagtagctgggattacaggcatccgccaccatgccagctaatttttgtatttttagtagagacggggttttgccatgttggccaggctggtcacgaatggctgacctcaagtgatccacctgcctcggcctcccaaagtgctgggattacaggcgtgagctactgcacccggccactgctggagctttctgatgtgtgctggcctggtgtccctgaagtggcatgcacagcccgcctatccagaggttacatatccatgcattcgcgtgaacatcccgtagtatactggggcatcactggggccccgagctaggagtccacccctccttggaggtgatacccaggctggggcctgtggggaaggctgaggccagggttgtgccctctgaacatctgcaatttgtccttgccttggtgccaacccctgaccactgccctgggatggcttcatgcctggatgcccagcacagagcctggggctaagggtccctgatgatgaccacagaccccaccccccagtgaggaagaccctgttcctcccttgagtcaagtcacctccttcccctgcccccagctgagaacaggcccaagtgaagccaggggtggcccagctttagttgaccacagtctaataatggtgagtcatattgtatactttgtatacttcactgtatacgaagcactttcctcctgggacctcactggactctcgctagccctgggaggtctgagatggccttgttaagataaggaaatggaggcacagcaaggctgggatggtgcccagggccgatggctggtgagttgcaggatggcgagcaggacccagatttaggggctccagagagggtagatggcagctggagaggtaaggatgcttcgggcagggccagggtgaccttggctgcccggtggtaaggcccaccccaccaggctgtgtgggttactgcccctctgggagccgggaagctggggcttggtgagctcaaggttgaacctacaaatcatcgccaggtgacttgagctgcccttgcggctgagtgcatcccccatgagtgcccagcagggactagctcagtcctccagcccaaggccacactgcctttaccagtcacctgtgtcctcctggagcccacagctcccaggggctcggcaagggtttgttgactgaacagtgatctttctgactctcagagcccactgtccccttcctggaatgacactccctcgtggtgccctactccttccaagataaagaagaggcactccaggtttgtctaagaccctgcacacccatcctggctgacaccagccacctcatcttccactatccgccccccagcttctgtcccccactctaaccaagaattcctgagcctcaaagccaaggctgtttcacgtcacagcaactgtgagcttctgctgtctgcaagaacatccctcctgcccctccaagacccaggtcaagaggcacctccctgaggaagctgatgtcaaaatcgacttggccctctgtcttggggtcacgaggtaatgcctgcttcagcaagatcttgctaagccataactgtctaggtgcccagcccccatgctggaatttcagctttgccagggcgagatccagcagggcccgattcacttctggtccctggtgccctaaacagcacctggcacacagtggactcccagccatatcccccgaactgtgcacagccaccaggcatggctgagcgggttattccatcagctttgtggaatatcgtgcagctgttaaaaccacaattatgaagatgatttttgtttgttttttagggacaaggttgcccaggctggagtgtagtggcacgatcatagctcactgcagcctcaacctcctgggctcaagtgatcctctcgcctcagcctcctgagtagctgggactacaggtgcctaattttttttttaaattattttttgccgggtgtggtggctcacgtctgtaatcccagcactttgggaggccgagttgggtggatcacctgaggtcaggagcttgagaccagcctggccaacatagtgaaaccccgtctctgctaaaaatacaaaaattagccaggcgtagtggtgcattcctgtagttccagctactcgggaggctgaggcaggagaattgcttgaacctgggaggcagaggttgccatgagctgagatcgtgccattgcactccagcctgggcgacaagagtgaaacgccgcccccccaaaaaaattattatttttatttttttgtattttttttatctcaaactcctggtctcaagcaatcatcccaccacagccccccaaagctctgggattacaggtgtgagccaccatggctggctcgaagataacattttgatatctaagtgtgacatgtcaaacagagctacaatcatacaatccattccactgcgaggcattgagtgcccgcgctctgtgccagctctgtggcttggtgtgggggtggcagggatagaaaggggtctctccttcaagacatttagttcagaagaggaggaaggcttgaacataattcctgagccacacgccaagtgctgggatggaggaatgacagagccccagggccacacgtccatctgggggtctgggaaggcgggacggaaaccacagctctgtaaaaattacagccgtctctgcatggacaagcctggaagggagcagaggaacggaagctgttgacgccacagggcggtggcattgtgggtgatttttctttcttttattgttggtataatgctgtttgggcaataaataaaaattgggaggaaaaaatagctgtttggtgaattgagtagaaattgggagaaagaagaaagggagttaaggggagggaaattagaagggtgaagtgaggagggagaggcaggaagggcaaagacaggcgcatgcagagcgcacagaggccagaggcggcggcctcaggctaggccccagtctgttcccggactgggcgcaagagggctgggtttgcacagggaaaggagggggagaggtgctggagtctctgtaggggggaccctccccaaggggatctgggagggcatcccagaggggaggtggcccccaggcctcgatggacagcaaagagcagggccggcagagggggtcccagccagactgtgggcggtctgagggtggatcaggagcactggggccctggtgggggctctgggcaggcttgggactcagagcagccactgacaaggtgatgaggtctgaccagggcaggccaggctgggtatatgggagagtcccttacttagtgtcccagcgaatgccaagagcacggggactttcaggctaagaggaggctgtctggtctaaacactccctcaccccacccggatgccacccacaggcatgaacatcttcccagtctctaataggtgccaggcactgggccagccaccctcccattcaaggtcttcttcatctctcacagtaacctttggagctaggtagtaacggtcccatttcacaatccaggacactgaggctgggagaggttcagcaacttggccaaggtcacagtcagctggggatgggagggggcgctggcatgggaccctggcactgcccccttaataggtgggaggggtattgctggggagcgcccgggtgtttacagcacgcggcggatgagagggtctgcccagggaaggggcgccaggcaggaaggaaggggttactttggcatgcagagtaggcggtgggtacctgtttgtgaatgaatgcacgggtggacggatgaatgaatgaatgaatgaatggatggctggagggatggttgaatgagtgggtgcggagaggagggtgctggggaggcggcgcgtgagctagaacccctttctcccccgcctccacggtggaggttggctttgggagcctccctcccccaactccccagaggggtcggctcccccacccgcccttcccccagccagtttagccgagggcgggggaggggggcgcggaggccgcttctccccggctgggccagaatccccgcgcggcggcgcagcctcccgcgccgggtcccgccggccagtgcgcagcgcggcgcccccgtcctcctccccctcccctcctcctcctctccctccccgctccgcgcctgcacgcacggcccccgccgccgccgccgcgaggggagaggcggccgcacagcctggttccccgcgccctgctcgccgccgccgctcgcgcgggcaccgccgctggtccccgccccgccgccgagcgcacccgcccgggcacacgcaccccgccgctggacgcaccccccgcactcctcccgcggctccgccgggcgcccgagccgggcagatgcgccgccgcgcgccccccgctccgggcccgccaccgtgctctgccgcgcgccgggggctcctctcccgggcccccctgggcgccctccggctctggttcccgcccgctccttggaataacccctgaggctccagccgtcaccgcaaagtttcccgaggagacccgcctccccggccgctgcgcaggtagggctggctgcaccgggcgggggtcggggtccgcgcgtctgggacagggcgccagagccgacggggcgggggccgggggcccgggggcaccgaagcgccacggggtcaggcagcctggctttgccccagagcggcgggagatgggacgcccagcctttgggatttggggtgggggtccctgagtcaagagccaagcaccagtagcggtggcgctggccccgccgcggggaggcgcggggtgcgcggccggcggctcagctctcccgagccgaggctggaaagggcgggggctcagctggagctctagtccaagccctcgctgcaccccccagggagggggcctggcccgtggggggcgtcaggccggtcatgtgggtcccagctcccgcactcgggaaccggaggagggcgcgcggccagggacagccggccggcctgggcgccgcgctcccgtccccaccagccgcgtgagtcacggttggagcgaggttttatttttaaaacgacttcaaggggggcatgagcagcctccaacttccctccctgtgcgcgctgtggaccgtcagccctgagccgggcgggggctggggccgtacacctggcggctggaacggtgagaccatggtgcctgggcggggggcggcgggcaccccccatcccccagctctcaagacaaggaggcggcccgacccggcggcgcacgcccctcctcgcgggcactggagaccccggggaggaaggctggggagtgttgtcgcccagctgcagggaaccgtggttgatcagagctccccgaggaggagaaagttgtggaacagggacaccagggagctgccacagccttcccggtggccccgggaggtcttcgaggccctccagggtgggcagttttgagagaatacagcccagctggggtgtgccaggcccccgaggcccaagccagagctctgatgtgaataaatacagccaaggctggggacggaggtgaggggtgactgagaacagccctgcctcaccgcggcccctacgccctcgggttggatggaaaccagcccctccacatccccctccccaggtggctcaggagttaggaaggaggctgtctgtgggggggacccacgatgccactgtggagggaggtggctgaggcaccctgtctctgcccggcggccgcgggggaggcagccgccgcgctcaggggctccagattccagtttctggagttgaaagctactgcatctcttccgccagccccgggaggagaggcgcagacatcacctgtcagctggtgctgactccgtgggcgactgttcagggcttcctcagaaggtttaaaatggaaatggcctgagctgacagggcccgtgcctgggaggggacgctgcctagctgggccagcagtgagggggccctggtaggtgtgaggggcaggaagagctgagggctgtcacatatctggctgaagggtcggccatgggcacagggtgtgtgtgtgtgtgcgcacccagtcccatgttctttcccagacacagagactggatactcttcagtaaaaagcaccctgaccccagcatggaggctccgtagcccacacccccaaggcagctgtggcctgctggacttcacctagacctgggtctgtgcatccgcactctaccatttattggtccctccacctccctgtgcctcagtttcccttgttggtaaaatgggattgatagtgccacctcctgagcctgagccagggtgctgctttgtaagtgcatttgacgcatgttgttagtggtcctgctcctggactggaggattctcaagggctgagggtatctgcagggacttcagagggtcggggggtcggattttcccaccaccagccagtgtgctgtcactggacttcatcctcacgctggccctcagtggcagcgccctgtgtcccctcctccccatctccgaggcctcccatgaaagcccctgggaggtccgcccagctgtttctaaggaggtgatggggagggggtgctgccatcccactggtcacccactgccagaggtgtacagacttagctctgtagagattcatgcctggtggctgagcctgtgtcgcattcactgggtgaccctgggcctgcagcctcccctctgggaccggcttccttgcctgcgcaggggtttacagcagttgtcccacagagaggatgtctgggtgttctgcgtgtgggtgcagggaagggcagtgcacacatgagcaggtggcatctgtgcttgcttcgaagttagctgagaggactagggctccaggtggccttgaccctgcgggtgttgagggacggagaggtgggtgtagagcccagaggccagcacgggggcagctgtcaagtggctgctctggtgcagggggaggatgaggcctccaggatctagctgggcacagccacctctgcccagtcatggggctagcagccccctccccagccagccagacatccccagaatcagggctggacatggcctgatctcagagatggggcctgtatgggactgtgtgggtctggctgtgctggcccttctgctctagagtctggaaatgatatcaaccacctagtcatccctgttgattgtgttcctgggacactagaatgccatcacagggtcctaaggactttcggttcctggggagggtttctctacctggcctgctaaccttcggcaagtgacccgtcttcctcatctgtagggtggggtaacagcagtacctaccttggggaggcacccacgttgagaggatgcgtatgaggtttctagcagagttcatgcctagcaatgtggggcccttgcctagtctacacccctcgttcactgtgggccaagggctttcagcttcttcaggccttggggtggcagggaggactgaggtggccctcatcccctgcaggcaggggccatccactctggtacctggcccaaggggcagtgggaaatgccccagagcaagggggagctggagggcttttgctgaggccccttataggatggggtgcgtgaggcatgtgggtgagcgagcgtgggtggacaagaaggggcgtgggtgtggcgagggtgctaactgcctatagtggggtgggtggggactgccccgggggtagctttccctgctcactggcagaggagagcgccagcctctgggaggcccaggccccaggccctggctgctgcccccggtgtactgccttccaagtgtgtttgaggtcgggtggtagcggggggtccctcctcagaacctgtgttgttctgccggagacaaagttcaggctctggctggcccacgaggcagctgcattctgtcctctgccatgggacactcaccctgagagggccagggctgtggtgtggggcagactggatggccgggaggagacgggaaaaggacagcacccctgttttgccctcctccccccggacagcctgcctggagttctctggcagcagctggagacaccaagagggttccatggagcaggctgtgtttgtgcaggcctgtgtttgcctgtttaccatcgctcgaggcccccagagcactgccgctccccggggccagcggctctgcagatgatgtcagggtttgggggcctctccttgctttgtggaggttgtttgctggattcctgcagccctgggttttaaaatgacaacctgcagagctggtggctagtgagggtgggggagaggacagggaggaggatgggtgggagtttggggctgaagccatggaggataaatgggctggcccaccagtgctcctctggcacgcctggctccctggctcttctgttttcccttccctcactccttccctcctttcctgctcattcattcattcattcattcattcttgagataatcattgagcattagttattgccaggcacagtgctgggctctgggacaaaagtggggaacaaaagcagtgggtgtcttgccctcagggcgcttccagtcagatgtggtgtcagacattagtcagatctacctcttccccgtgaagccttggctctgaaggcgcaaagtggtgaggtcaagtaacagaggggcctgctgaggggtgggattgagggggacttcccagggaagggggtgcttaagacatgaagagtgagctggagccagggaagggcagggacagaaacaagggcctggaggacaggatggatggagagggctgcatggagacccccggcaggagggcagaggggctcaaggcacccggccagggctggggctggtgggctgtctccctgggtctctgtggcccatccatccccagctctctcaggattcctgggtctgcctcagggaccctctgcctgtccttgcagatgggcctctggaagagtgggcttcctaggcccgggatgccaggtccccttttcccgagagctgtgtgttcacctgcgtagacaggttgccccagcatctgatgggctgtgagacaaatgtgggcttgtttatgacgggggcggtagccctgggtggaccgagagctattagtgatgaaggagagtccgcagaaaccctccccagccctgaatgttcccggtgcagggaagtgggctggggtgcaggcagagggagaagggagtgaaggggctgtgtcctggagggccccggacccggctgtatggggctcagctagccactaggggacactgcctcccaggcagaccgcaggacccaggcatccgacgtccggccaggccccaggtgtggcaggctctgcttcaaggggtcaaagggcatcctcatgggcagacggggtctattgtctggctggcagggaggcagtggccgggctggttggggatggcttatacttaattaaaactgggattaaaactggggtcacggggcgctagtcctggccattcctgcccgcgtcactctccagaggcagctctgtggcagtatttttttcacgcccctttccctccttctgcctgaattaatcgttggcaccagattacaacagatttagcaaactgtaaaaaaaaaaaaaaaaaaaaaaaaaaaaaagcatgagcgagagaggaagagagaaaagaaaggagggaatgccttccgtgaggagccggcatttatctccagaagcaaattgctcttcttgaaccattcctgctgccccccacccctccaccccccgtgacgcctgggaaatgctgctcgggaaaatgtcctcaaaaatgctgccgggtgctggaaccaggaggggcttttcctgggggaggtcagccaggggctgaggaggagaggagagctcaggggagtgaggagggtgcccggggctgctctggagggtgtgttgggggacacctggctggttctgagtggtcgcagaggtggggcttcgtgtagggcagagcgagtgaacagatgaatgaatggaaaaaggggtgcagccaggaccgaatgaccgcctcgggagctggtgtggtggcagtggagggtccagcctgcccatcaggattcctagggacaaaatccgagggactgagctctctcaagcgacatagcatcttgggtcttggatccaattccacttctctctggtcagaccagagggggcctggctttggttcagggaatctggctgttagggggtgggtgtctggccctagggacatggcaagtcgcagagggtcacgggagtttcacctcaaggctgagggtgccccgcccagttaaagcacaggagtgagattcggtgggctgagagcccctgggctcctagcctgggctgggctgccccaccctgagtggggacttgggttcagtggggggcagttaggggcccacccttccttcttcgctcactcactctctcgggcagcggccatggtgggccaggcctggagctggccacagggaaggtggcggtggcccagtccagtgggaccaggcgggagggggagacagatgtgcaccacgctcacacctctggtgggcacacatgcaccttcatgcacacactcttgcacacacatgctcacacctaacccaccttcctctcctgtcttccctgagccagcctgagccaggctctgaggtgaatgaagcccacatctcacccccacctctggaagctgccacgaggaaggggctggagtggctgccccacccttcccgtgcagtcccctgcccttcctgcccccagacagtggccatctgttgcccaggcctggacccctctctggggaatgggggggtgtgaaggaatgagaagtgggagtgacagcccctcccctaagccctgctccaatagaggaggccctgtgatggccagccctgcagcgtaacctttgaccccagggagccagcagtcaggtaggctctgggtagggccacccccttggctagccaatggggggctggcctggtggccaggcctgtgggggtcttggaagcccttccctgcctcactggggctgcatgcctcctaggctgtctaccggtcccagggagatagacaacactcccctgatcccccagtcacagtggggtgcttcatgcctcagtttcccactacttctggacaaggggttggaccactaggtccctagtagctgccactcagagcagcaccatggctctgagccctgagacccccaccaggcttgggctagccagaggggctgggtagtgccacaccccagtttccaggggcttctggcttgacaagctctgcctggtttatcttcttcccactgtgagagcagggagactgaggcacagagtggagacacgccctgtccagtgccatgtggtagtcaggacacattctggggcagaagggctatgaaatgaaagctctggagtcgatgaacttgggctcgaagcccacctttgttacttatcatctgagtaccctggacgcctcacgtcccctctctgtgcctctgtctccacacctgtgaaacaggatgatggcatacgtgctgacatcccagggttagcatgaagactccatgtgactgtgtccacagaagggctttgtgggaaccagtagttactttggatcattggacaggccccgccagacacgtgctgggataatcaccctgctcggggctctgaggagctcaggggctggagaggggctgtacaggctagctttccgccctcaggaccccaccctctctggcaggaaggcttgtggggcactgctgagccccgaggtctggggcccatgcagtagcaggtggaatgcatcagggagcagtggactctaaacgcctggttgtgacaaaagggcaagttgaggtgtgggtgactcctgggggagctggggagagctgagctctggagggctctggagagcagcaagggttaggaggcagcaggtgtgggaagggcaagaggtcaaatcgtggaaagggaaagcatggggctcaaatgtcaccttctgctcattaagggtggcagagaggtcattattgagtgtttactgcatacaatgcatatttcatagagcaccatgctaaggactctaccttgcagaatcccactgaggcttcacaacagccccattgcacagaagagaaaactgaggctcaggcaggtaaagtgattggaccaaggtcacgtagccaggacatggcatcttttttttttttttatgacggagtttcgctcttgttgcccagactggagtgcgatggtgcaatctgggctcacagcaacctctgtctgcaacaggttcaagctattctcctgcctcagcctcccaagtagctgggactacaggtgcccgccaccacgccgggctaatttttcatatttttagtagagacggggattcaccatgttaggcaggatggtctcgaactcctgaccctcaggtgatccacccacttcggcctcccaaagtgctgcggttacaggtgtgagccactgtgcccggcccaggacatggcatcttaaagcatatgctcgtaaccccctcagcctacaacacatgagagtaatcaacacagcaatagtagctgacatttatatcacacttactatgtacctggtggttggcagttcccccaacaacttttttttttttttttttgagatggagtgttgctctgtcgcccaggctggagtgcagtggtgcaatcatagctcactgcagcctctaacttttgggctcaagtgatcctcccacctcagcctgccgaatagctcggactacaggcacgcaccaacacactggctaattttttaatttggcagagacagggtttccttatgttgcccaggctggccttgaactcctggcctcaagcgatcctcccgccttggcctcctgattacaggtgtgagacactgcgcctgctctcccagcaacttctgaagtaggcactattattatcctgattttaccccaggggtaaactgaggcactgagtggcaaagtcacttgcccaaggtcacacagaggaaggggaaccacgttcattagggtgaacttgggtcctttacaaaggaggatgggaaactgaggcatggagatggcaggtaactgcctgaggtcaccagcacctgagctttggtatctgtcatgctcccccctcaccagacccctccccaagctggggacctgcccaggacctctgagctgtctcctgtggtctaagagcctcatacttcctcttccctgcctggattctgccttcgtttcctgaggccccactgtgtgctgggcctggggctggtactgacagtaggtgatgtcatttaacacatgtgtcagggaggaatcagggaaggcctcatagggtaggtgtcatttgcactttggagccaggtgggagggcattattcctggaggggaacagccttggcagaggcattgtgagcagtcaggcctgtgcgggctgagggggagcagtccgggtgcatgtggtgggtggcatgtgcttctgcctcggccgagtgcttttctgcagcccagatgctggcctgtgacgtcagcaggtggcccagctgggcctcgctgcccgctggtgccctcgggaggagtggggcgggtggtgggcgaaggggcccgggagggtgctggcggcctgccgtcacagagcaatctccattagggcccctgagcgagtggcagcagctcctggaatcctattaaaagctttttcattgttccccgagttatgctctgctccgccgggacctgggcatgttgataatttatttgtggaagggaaaggggtgaagagcgcaggagagaggaggaaatgtcattatttactcagcttggtttctgcagcgtgggccctgccgtggggcagctggagagggggctctaccacccctatcccagcctctgggtcacttatgggacccaatttggtaggtagggggtgagggtctgccgagggagcagcggcgttcagctggggtagccaccttgctgcgtcctgagggtacagattggagagactgctcctggggtctcaaaggcaggcgcacatccctgctgctggccagccatgtggttgcataagccactgtacccctggatgccaaaaaccagaaatagacctcacttttctgggggatgagaaggaattcagaactaacaataatagtaataacaggtgggcatgctggctcaaacctgtaatcccagcatcttgggaggctgaggcaggaggatggcttgaggccaggagtttgagaccagcctgggcaacatagcgagaccccatctcttaaaacaataacagcagtgacactgggtaacatgactgagcactcactgtggacctgcagtgtgctaaacatgtcacgtacagtactgtatctcatttaatccccataagtgggcagtgatactgttattattccctttttacacatgaggaaactgagttacaggcagccaaggtcacacaggtcacacaggttctgagcggcaggggtaggatgggaacccggcttctcttagcatgggtgctgcctctggcctcctgagcctctgttctccagagcagccgactcccactgggtccccagtccctctcatccaaagtgaggaagccccagaagagggacaggggccacctcctgcagaaccttctagtagcaaacttagttgctactagagcctggtggggcacagatgaggaaacagaggcttacagaggtgacaaaggcagggtggagccaggctggccctgggttcccaaagtgtcccctgtgctggggtgcgaggctgcccaaggggacaggagggagctgggtcctacccttgccctggaccccagacagtgctggcctttgtctgggaccctgcgctgtgctccagcccaggtcagcttcatgcacactcctgattggcccgttctttttttctttttgagacggagttttgttctcgtcgctcaggctagaggacaagatcatgtaccctcccaagtagctggggctacaggcgtgtgcctctatgcccagctaattttgtatttttaatagaagcagggtttcaccatgttggtcaggctggccttgaactcctgaccttgagtaatccgcctgcctcaacgtcccaaagtgctgggattacaggcgtgagccgctgcgcctggcctggcccgttctttaagctgtggaggaattcatggtgtgatgtgaagtcttccccatccctgcctctccccatcctctagccagatactgccggacattttaaaacacttgaattcagtcaagtcacgcactagctctgagaccatcagtggctctctagttcctgagaagtccagcgccctcagcctggcatttcagaccttcccagcatggccctggctgatgcaccagcctcgccccagtgccccccccggctagcatgctcacacctctgagccttcgacgtgctgttccctgtgtctggaaggccaccctcactccccgacattggctgcctcatgaaaggcggtgcaggtggcactgcctgcctccacccacctgtggtgcccccctcccctcccctgccccagagaggtgctgctgaactgtggaaccagtcagattcctcaactcctcccagcaagccttcctggcccgagataaatggctttctttgtacaacagccctgggagtgggtagcgtgagcccattttaagaaggcgaaacctgaggctcagggaggttcagtcactgggccaaggtcacccagcaatcggaggagataaagccaggtccatgccatggggtccctgtcctgttccgtttcacccccagcagccgtaaagcaggtggaggagtgaccagcttggcattccctgagccctcctcacctgcctggcattcacagaggatcacatttaatctttacagtggcccagatgtacttagaggctccattttacagatgaggaaactgaggttaatagagggaaggaaggccgggcgcggtggcttatgcttgtaatcccagcactttgggagcctgaggcagatggatcacctcaggtcaggagctcgagaccagcctggccaacgtggtgaaaccccttctctaccaaaaatacaaaaattagctgggcatggtggcaggtgcctgtaatcccagcaactcgggaggctgaggcaggagaatcgcttgaacctgggaggtagaggttgcagtgagctgagatcgtgccattgcactccagcctgggtgacaagagtgaaactccgtctcaaaaaaaaaaaaaaaaaaggaaggaagcaggaaagcagagccccagccctgcagcaacttcctgggaccctgatggtggataggagctttcccagtgccctgtgtgctgggcctgagccaccacttcagagtggggatgctggcaggccctgcccgcctgaggcccagcctggctctcaggcctgcagcctgccctggccggcgggaggcagtgggcccagaagcagggccgggcaggggccctgcccccacgacagctgcctctctggcccactggcctctcagacagacagggcttgtgagagccgggggccttcgaggagagctcagctcccgccggcagctactcaaaggcctcattgtggcaggagagtctgccatgggcagctgcccccatgggaggtgcagacagagcccagcctttgtgccagtgcactgtccctgccctgacccggggtcagcaggacagaggcccttgtctgtggaggctgggggcctcccggggagggtctgccctggaccctccgttggcctgggacgggtgtggcctgtgttgccaggctgtggttgccagggacccaggagcccttccagctcccagatccagccatggaggaggctagtccttggcctgactcaggcttggagaggtgcagaagtcaagcaggatggttaataacagtcatggcagcaggggctgcagccccagcggaattcttactgttcctgccgctaagcactttatgcgtcatcaccgattccttaaagcagccctacaaagtgcctgcagtttttgctccattttagagatgagaaaaccaaggctctgcagggttaggaaattcaacccagatcccataactctaagggcggagctggatcccactccagaacccattctgagccccaggggctgctatccccaccaagcacccgaggtgggccaggcaccagggccatcccatggtgcaaacccaaagccgcccttgccctgtccccacagagctcccagccagctcgccagaccctcaaagcagtctggtgtgagggagagcctgtcatcccattttagagccaaggaaactgatgctcagagagacagactggggtgccggctgcctcctgccctgagtgtgggtgataggcagatcacatatttgtccttcagggggtggggcctttgcctgcactttgtgggtgaggtattacattcactggagtggggaacagtggaggaaaagtgacagagcccctgagaggtctgggggacttcagggctgagccaccccattcatagtcccactcttggaaggacccccagagaccactgtgtttgttaacaccccattgtgtagtaggaaactgaggcacagagaagcgaaaaagggactggcccaggatccccaaagccttggggattgaacagggtcctaccgatgcccaaaggctgtgctgttcacagcggtgcccacggccagtcctgggcagggaggtcagcaggccccctgagcacttcctgtgcgctgggcccagttctgagcattacccgcatgactcgcttcatcctcacaaccttatgggggaggtatgaggaaactgaggccccttccccaggccacacctccaaggtcagcctccccaagcggtcttggtctccgagctcagctggttctattggcttcctgtcctgcaggacctgctgactcccgcacagacatcctgatggttcagggttggaggtgcctgctgaagggggtggacgctgggggtgcagacagacagctcagtgatctgcggggcaggctgcacaccccagagcccagtgtcttgccttctcatcctgagggggatcggtttctccatctgtgaaatgggcgccagcctgtgggggacccacaagtgaagtcgtctctgcagactccctgcttgctagggctggggcctggctgagctgtgatccaccccaccatcccccagctctgttctagaaaggctgtgtcccagaccaagacgctgtggccccgggggggaggccaaacctctctcagagccctcttggcctagcgatcgcacagagccagcccaggcctggatgccatattataaataatgctattaatattaataagaaatggcctggtaaagtgatgatgagggtgatggcctactcttccctcgagatctctccggaggctgggaaaccaggccctcggtccttatgccccacagggaagccgggtgcaggctccgtcttcaccctgccactcccacctctccctccacccatccctccctccctagaccccagcctggggatgcagggagggccgatgacccatccccacaagaggagggacctgagaccccgagagatgagtggctccccaggactcacagctaccacgaggcccagagcttgactgagtttagtgctcttcccactgacccttctgaaatgtgcaggccacctaggggcagctggacacgtaggggtcctggggccaggcccttggccagccctcagtgtgacagtggtggggacccagatgcccgggcactgcttccactctgccccttcctggctgtgtggccatggatgcttcagcccccataccctctattgcttctgttcccaagggtcacctggtgaggacagccctccctcacagcgctaaggacaggcctggcacacagtgagggctgtccagcggtgaccatgacccagcagtgaccatggcccagctgactttcactcttgtcgcccaggctggagtgcagtggcgcgatcatggctcactgcaacctctgcttcccgggttcaagcgattctcctgcctcagcctcctgagtagctgggattacaggcgcatgccataataccccgctaatttttgtatttctagttgagatggggttctgtcatgttggccaggctggtctcgaactcctgacctcaggtgatccgcctgccttggctttccaaagtgctgggattacaggcctgagccaccgcgcccggccacagccttgcttttcttgaccctccaagactttcttgttgcaggcagccaggcctgtcccctgagccccactcctgaatcctctggaccagccttgcccagggggacagcctggtaaattccaaggattgaggctcaagtattgtgccccaccgatctggaggagagattcactccatggatgctgcctgtgggtgcagcccccaaagccccaggtttgaggccccctgaccactcacctagccaccttactaggcctcagttttgtcatctgtgacatggggccaggggtgccaagacaggatgatgtgggcagcagccttaccccacgtaggtgcccaatcaggggaggggaggggctggtccctcttttgaagtagctctgggcagacacctgccttgacggccctctgggtgctgatgtggtggggtgggtgcgtgtggtcacgagctagagaggcagcagggactctggcggcttggcctgacactcagtggtgacagtgatggcggacccaccctccccagggtggcactgattgagtctcattgttgtggggcgggggcaccctctcggaagcctcgctcctggctcctgggcggcagagctgtcggccgggcaggctaacagctgtttgtgcagagactaaatctgtccgggtctgacagacggccttgtgccaccaccgccattcctgcgtggagcgggcagtgggctggtggcagtgtgtacatcagccctctccgagctcacggcccggagcttataggggcaggggccgaggttggtgagctcctccctgaacagtggtttggccagatagccctgcggcccagtccctctcaggacaacttctgagggtgcccattgcccatggcttcattgcctgtccacccccagggacctcaaggcctagctgggatcctctggatattgggggccatggccgtcccatcgtggggtcctgcctttcctctctcgggggctgcaagagaggtagagactggatactccaaggccactggtgcccggacagtgttatgtgtttgtgccattcctgcttggatgagagggggtccaggcgagagctgggggcttgctaatgaacttggctggtatctaggggggcattttgggaaggaggaaggcagagtccctgcattggagcaaatcccttggaggaagccctggccctcctccctgtagtgagaaagagtggccttggggccagaagatggctcccaacaaggcacccagagccccggtgccaaaccagggatgctcagttctaaatctagaagggtggtaggaagcccaaataagcattgtcggggtgggggaaaaaaaacaactttttttgctgtgaggccttgaaacaatgtgagaagttgtgagaattatttccctgtgaccctggaaagagtttttaaaaatttttaaagagatgggagtctcactaggctgcccaggctggactcaaattcctggcctcaagcgatcttccatcttagtctctctccccagttgctgggactacaggggcaggcctgggccaagcttgtgggaaggtttaaatgttgacatgaagttagcccttctgaggttggcaggatggtcaggagcaggacagtatctgagcttccactcctcacccgctgctcttggcagacatggctaatcaatcccagccctgtctcctgctgagtccagggagggcccacctgggagggcaactgacctgggcatccctgatagtgttttgcaaatgaggaaatggcgcttagagaagccaagtagcctgccacaacctcccagcttctaggggtggagttgtgatgtaaacctgattctcctgactccagaactttgtgatcatggaagctggtggtccaggggccctttgcccaggtggggttctgccgtggtgccagcagctttaattatgcccctgccagagcccaccactactccacccagctaccctccagataggcacagtatggccaggcttggcctcacggtcagggccatctctctttccccacccctggctgcaacctgcctgtgcttgggtataattacattcggttgcttacaccccgggctctcaactgcagccaaacagtgcgctgcagcctccgaatgtggggcttctgattccctccagcacgctgggcctgcctgaggggtgtgcagggaccaagaaggtgcagtcaccaggctcatgcgggccccagacggagagctggggctgggcttggggccctggggtgggcgtgctggggagcagggtggggtgaggctcccctctttagctgctaggctggtgcctcagtacaccttgggcctcgttaggaggtagttttcctggctttgaggttacccttttaattaagccaattaattagtgcctttaatgaagcagattaagcaggctgggctctgttaactggggctgtcacagcccatggtttcctgcagatctgtacttagaggccggccctccctccaggggcactgaggtgcagggttaggctgggctggggatgtctgtggccccgatgggagtgtggccaggaacccaggcctgggttggggaggcaaggctggtctgaggctgtagggacaaccctggactcagacaccacagcacacaagggccagagtgggagcaggaagtgggagggatgtggggcccctaccctggggatctacagggggcagctggctcagcggggtcctcagcaggtgtgactgcctgggggaaggggcttaaggggcctggagcccctactttctccttcccttgccttccgctctctgggactgctgggccttggttgtttctagcccagtggggttgagccctatagcggcatcccgagccccttgcctgcccgcagatggggaggggagtgctcaaggtcacatgggagttaggggcagggctaagatgcaaggccgcatacccggttgcttccgtcatcccccccaccacctctgctggcccggagtcatccttgcatggcacggagctgttcctgcgttccagcaccgtgctgggcgctctgcactgtgatctagttgactccttgctcccacgtggttcagaaagcgaggccctggccctggtggcagcaagcagctgtcacctccacctgcgaatggggatgaggatcccagctccacagcccctgagttctaccaggcaggagcctggagccccacggctagccagggtcagggcagggaagcggaaaggaggccccaacctccctggggacgtctttaggtcttccaggtttgagaggacagaccatagcctgcttcaggagacagttggctcaagtcatgacaggagagatttaggttagacagaggaagaactgcctgacaacggggattattaacaagtttgcaaaggaaagaagcggccacttctccaggagactgagtgctttcggcagccagcctgataggctttgagctcttctgcaaacaccgcactataaatccagggtgtttccagtaaatatcaacaaagtgggtgctgggttcgctgtgcagtaccctcggcagccctcaccccttgcatcttctctctgctcagaggtgcctgatggggtgcagagtggcagccagccagcaggccccaggctggtccatctaccagggcaagccacggttcctgggcctccgtttcctcatctttaaaatgggtggagtacttggtgaggagagagacaacctcacctcctgctttttgaagaagacattcccctctatcttgctcccaaatcaacaaacttccttgtttcctgcctgaacccccacctggccagccccttcctgccttgatgggtcctcctgtgtcactcatcttgtctcctcaagtggccaccccttccttgggtggtactttccagccagcttttaagggaattctagcatctcccgtgacaaatacccccactactctttctgtcttggtgaccgccctctttctcccctgctcttcaccgctgaatttctcaggatggctcaggatctcctaccagccctttcctaccgccactaccatccagactctgccagtcttctcctttctttcccatgctgacagcccttcctccaggaagccttcctagatccccccagcctggtccagaaggtgaccctcatcaccgccaacctgtgtgtcctgagagcagccctgggctttagttgtccccagatccaccatgcccagcacagggcctggcatggagcccagcctgcaggaggtgctcctctgggccgggagcagggtgaggggcagccagtagctttgcctcgaatttgccttgagcgggacaccatgcagtgggcgggagacaggaacaaatgccatcatcacactcagagacacctctttaaataccagctggaagcagcccggtttctgggtgggtggagttgcccttcattcacaagaaacgatgggggatgggtgctttgcacaggccaggacgggagctagtggcagggcaggtagctcctggggcccagggtctgcttgtccccatcctaagtggctcccctgccccattagggggctaaagaggagcgggggaacctttcactggtgtcctttccagcacggagcacaaggggactttctctgtccctccacgaggcagccagcccagcagaggcagggacatcatcttttgcttctattccccggggcctgcatgttagaccaggaataaatagcctggatggatggatgggtggacagatggatggatggatggatgatgggccatgggagggagtggcagggggattccctgctcctctgcactgcctcagtttcccctttcatacagaggatgctggtttgtgggattcagcctctttctgggtaccattcttagcaccaggccaggccggtgactcttgggtctgctattgtccttccagggcttttggcaggcagggcacagcaggtgagggacagatgccatgctgcctgcagccgacagccgtatcagcacccggggagctcctgggagggacgcgctgtcggtcctctgggcctcaggcctcctgtccacagaatgggagcacagtttgtcctccctgtgggccagggttggcaggaggctgtattcagacaggaggaggaagggagcttggagtctgctccacccccggcaataagcagccccggcagttgggacccccgcccactttgctcccatcttttgggctgtgcaggcaaaaatgcctgggtgtctttgcccatttggcttccctggaggagctgcagcaggtgggcccatgggagaggctgagggagctaggcctcagcctgtctccagggtccctgctgcagcccctacacgttttgcttcctgctcctcccgctaccccgccactccccgcccaggctctgcttcagtgccagaatgaacaggccccctctcctagtggaaatttacacccacagcccaaccaggctgcctgaggggaggagggtggggaggaagggggagcagctgcgggaacaggaggctgtactagagagaagacagacggacggagagacggagcctgggtctccatctgtaggcaacagccgggggcctggcccaaacctcatgccccaaaggctgcggccagggtggccagccctgagtccggatggcagcagccagggctggttgtgatggagaaacatggccgacaggtcacaggggacaggcaccacccggggctgtgcccaccagcagcactcataggggacagcagagaacccggcaggggtgtgaggcccatcctggggaccccttggtgtgggatggggtagtgcgaaccctgggctgaaggaagggttctggctggtgcaaggcctgtcccaccccctgggatgacctccactctgccttctaaactcatctacactccctagacccaaggtaccagggtcggagctggtctgcacccatcgggctgacactgccacaggacagcccctcctttgctcccagcttccccacccagcccgggtacagccttggcccttcctttcagcttctgcgcccgtgtcacccccctaagcaagcctgccctgggctcccaggctccaggcctccctgcaggccagcctgcgtcgcaccagctctcacgaaacagggcttcctgtgtgttcatcggctccctaagtgcttgctggacccgggtgcccctgtgccactttaggccacagccagccccgtgtttataaggctgggagaaagggcagcctctgggaccagcttggctgggggctgaacgtaggggacgggacagcccattggtggttcctccctgcagactgagagcaggtggggtccctctgctcaggccgcagggacccctcatccaccctgtatgtgcacagctcttgctcggtgaacagtttcacctaccaaggcagatttaaaacctcatggggagtgacccacatggtgccagctcatgccagttctgaggacagagagaggccagacccagtccctcccctcaggaagccccagccagccaggaaggctggcgtggaggcaagcccagctctccaggccaaacagctgccacgcccattttacagatgagagaggggctggcatcctgaggccatctggctggtcactgcccgagcaggacctacacccaagggcctggaccccttgaagatcaaggtcaggagagggggctacagggtccccagggtgtctgctcccccactctatctgtacccagacctgagggagaccttcccacaaaggggtgcctgacatggcccaggaggaggaaggggacagccacttgttgagcgcttactctgtacttggtgctgggcatgttcgcgggtccagcaggcagcagcacccctttccactttacagttgtggaaaccgaggcacgaattcgtgaggtcacaggatttgaactcatgtgggtgcaaccccaaagccagttttctttccactgtgccacccctgggctcccaagacaacgctgccactgccaccccaccttgtgctcagcctcctgggacagctggcctgccaccatctgtgagccactgagtaatgcgcaatgtaatctgcgacactgggctgcgctaggaacaattgcgaacccattacaggcctattttcctaatccatgacaccttactgcagcccccagcgactgtgtttctgggatagacggtggaatgctgtccacccacgaaatgactaatcctctctttctggggctggtagagaggtgggcatctgagcagggtaacctgctcctgccccgagggtgctctcggatgagcagttggggactactgtcggctctgctgtgctccttggtgcccatctcagcccccatccgaaggctgacgcttagaggaggcagcccaggcagggcttagtctggacagtcacctgcaggtgaggagggcttgggggggggtcctcccctgtatgccaggcctgacgagggggcacctgtagctgccacctgggtgggcgaagagcaggtcaggccttttcccaggcagctgcctcatgccttttggaaggggcagcagatgcccaggcctgggagatgccacgaggacactgaagagggggtggtggaggagccggcagctgccgggtgcagcgggcacggccctgtaattgggcagcctgttcccagataaggcccatgacactgaacagcttcccgctccacgccggctgcaaccgctcatttcctgctccctggccagcgatgccaattacctcgcctcctgcttgccagcggcagcttctagggtggccagacgattcctctgtcatcggccagggcctggatcctctctgacgggtgggagggcgtgaagagggcagccggcaagggggggtaggaccagtgataggggagcttccatcttcactctggcctgggccacacccaggcacagctggaggtgggggtgagtgacacatggacccaggctaccgtgggagggctccatttccccctctgcccctaccttcaaaacaggggctcactgtctactggatgggctgaggagtgcctgatgctctttggatggagtgaggatgggcacccaatttgcactgggggaaactgaggctcacatggaaatttgaccagtgctgaaaggacggaacagcccctggtccttctcttcctcttctgtgtttcccccagaggacagacttggggagcagtaggaggggcagcctgtctaaagggggcaaaggctggctccagattcctcttgccgagcggggaaaggggagaagcaggtgagaggtgccgccctgtgaagagggtcttgcgggtcctggctccactgaaggtggatgcgtgtagccaccgacatgggaggcgttgcgggcttatcccaagaggctcgcagcccagcaggctgccctgctccctgtagtgggggtgggaagagatgtccccccagggttggaggctggacagggaagcgtgggcccacctgttctgagagggcatcccatgcccttccacaggctgaccctgggtacccaggccccccaggccatccctgcctgcagggtacttccaccctcatctggggaacaggcatctcagaggctggaaggtgtgtgtgcctccgcaggggtctcggggtacctggactcttggatggatggtgggccagaaaagtccagccctgcagtggtgcagatggggaaactgaggcctaggcacagagaggggcaggtcactcagctactcccagctgaggcaaacgcaggccttcccctctgagtccgggtctattccctctcctgagtttctcagttaatcattttgggtcttccaagggtcctgaccccgagaggcccgcccctaggcgctgattggttgctactgatccaatagggtccagcccttgaaggccgaggaggcgaggcgaggctggcaaccgcgacctcctgagcagctggggcgcttgggggatgttggggggccggggcaccctgtggtactgagggccgggaagggcggtgcgggacgtccaggggcccccctcccacacggcaggggggaatggcgaacaactccctaaggggcaactaacagaccaattaagctgccaataaaaaatttaatcaagtaataatgcaccttactttgtttaattagtgttctgtcaagtgaatgaatatttaaggcgcggacggcggtgccagcatctgcccagcgggcagagaggccaggcccacatttcaagcggcctgacagctccccacgcgggcgcccaggaggccccagagctccgggagcggcgggaggtcttcctccgcctgcaggccgatctgggcctcagtttcctcatctgtaaaatcgggggcaggagtccagcagaacaccagcctttctgccagacccagaaggcctcggattggttgtgtttccggatccctagagtcccaggcaggtgcgggaggcatgtgggacctggggcccctgtcggggctgcccgcgactccaggccctcacagatgcctggcggctccgaggtcggagctgtgtgtgctgtgaggggtacccagagcaggccccagcctggagatacgctgggcagtggcctcccatgcgcgcacagcctgaggattagaactggtgaaactgggttctcctccggacgccgtgacctggggcaaggtctgtctgcgcttctctttagttcattcgttcattcattcattcattcattcatcaacttcgaggctgagctctgtgccgagcccactgtattttcaccggaaaatgcgagactttcatttctacctctcgaatgcccagtctttgagtcctgcagcccccgggtcgcccgggtcccggagccggcgggtgtgaacggggccaaagccctccaggccgggcgtgtcagccccgcccccgaggctctttgcatattcatgaccttggcgggcatgcgcaccgcggcggcggcggcggcggggctcccgggccgccaggcgaccgggcgggccggcgtcgaccttccccgacccaggcatcctcaaccgcggcctcctcctcccttgtcttgatggaaagggcttggcgtcccccccactcccaaccacctgagagcctcgcgctggaaggactttggtaattatttgtttcagttgagctgttttcagtctaggctaggctgagtcttgtaatgagtatggatttgccagtaaataagtcccccgcttctaacccctgtaataaatgcatttggagtaatctggcgatcacgcggtgtaattgctggctgtcagggcagatggatgctccgcgcgccgactttgcagccgtctgcccttccttcacgctgagcctccgcccccagcccgcagcctggaggtgagggccctctgctaggcaagaggaatgggcttggcccgcccagaccccaggccggcctcccaggaccttggggtgcctcctgcgcccaacagcttcgtgggctttccaagtcccctgcctctgaccccgcagtccccaggcagctcctccccggctctgcactgtgatcaccggtcttgttcaccattcagggttctgagcaccaccccccatttgctgcattgggttatctgtggatggggtccgaatctgcatgcctctctggctccaagttaggcagctagggcacttttgatatgatactatcaaggtccaattttaatttttagaggagtaaatgagactttttttttttttttgagatagggtctcactctgtcacccaagctggagtgcaatggcacgatcacagctcactgcagcctcaacttcctgggctcaagccatccttcaagccatcctcccacctcagcctcccaagtagcgggaccacaggcgtgtgccaccacgctggcttttttttttttttttttttttgtagagacggagtcttgctatgttgcccaggctggactcaaattcctgggcctctgccaccaccatgccacccccacccccctgcccccttctacttgcttctgttagttactttcccaaacaaatcctgtcctgagattctgtcctgtccaaagcctctgcctggcatgcctttgccccttctctgcctgggggatgtctgcttagctgtgctgaaatgcccctctcctccgcaaggccttcctggatttccccagacagggattcctctggctgagcacccacaggggcctggttctgccacactatgagggttccacctcccctttgcttcttggagtactccctgtgccttgcatagtacttggcacacagtaggtgctcagtaaatgcatctatcagtgagtgagtgatgagccctgggtgtctcccagagggagtcctgcgtctgtggctggctcagacatatgcagaggccctcccacacctggaggtcttatgtctgcctagccctctgcccacaccctggaaccaactgggcataggcggaaggctcgcctcacacagggctgcaggaagcatcacagatttcagccaatctggcgcagcctcctcctgcactctggcacccaaacagaggtgactgtgagactcttgtacaagctcggtctctgtttcctgaacaccaccatgtacaggcactgtcctgggcgctggggatggagcagcaaaggcacgtggccctgcctcagtctccagctctgcagcaaggtttctcagggaagccagagtgctgaaggcttccagtgtgcccgtcctgccccgcgcagcctgacccaggctgaggccccagatgcccaccccaaaaccaggccgggcaggtctggggtgcctggctttatcaggtgcctgcccacacagctcacacagcaggggcagaactcagcaggggcacctccaccccggccccgcctcctaggccagtccttcccagccctgcactcagtgtgacccttcattccccacaaacacctgagccacctccgtgctccagcatggcctggggctgggacaacacagctgcaaggggacagggctcccggcccatcttccgagctgtgagggattcagtgagatataacttgagcaaaagcaccatgcctggtgacagtcgttctagtttagtctccatatgagtggaaacttcagagaacaacgcgggcagcagagaggccaccctatggtgatcaaaggcacagatgcaggagctgggtgtgttaaggctctgtgcgccctgcttagggtacacagagaggtcgcttaccctctctgtgcctcagtttcctcatctgaacaatggagagcaatattagcgccctcttcctagggataatattggccaaatgagttaacagttgtaaaacacctagaggattgctgggtgcagggaggtgccacacacgtgtcaactgaaaatccagcagagacccatgccagatgtcagggaagcccaaggagcgatggagggagaggaggaggacttccaggggtggcgaattgtgcttttcttgaaggatgaacagttcatcaaggggtggggaaaggcatcctggcaaagtcccaggtgccccccaaaagtctccgttactgcccagcagccagcaaccttcaatgcggcctcttccccggcgtctcttcctggtgaagctcacgtaggaatgaaaccacctctggaggagtggggtttgtgtgacgtgggagtgtgtgctggatgggcagaagcctgggggtgtcaagggacacacctcagcgggtgctgaaacctactcccccctccatgggcagccacgcggtcctcgcccggctgtcagccagcaatcatgcctaataaaggccccaaatgagacagccgaacaggagcaccttcactctaacaatgcaattagcacagacaatgcctcccgctttctccccagccccagagagggtggtggagggggaccagccgggccctccccagtgagctgcggagaggtttgaaaggaaccagtgatagactaagaggtgacaatgaatcgcatccgagtgacggctcctcttgtcaggcagccgcagggagagagcgcatcttcactggatctttgtaggttagccagctttgaacagcgacacccacacaaacccgaggtctctctctctgcgccccctatctctccaagcccctcggtctctcccactctccctttcagcatcttctctctcttgtcttctgaggacagatgcaggctgggtttacatgaataaaacatcagtgtaggggaaaaaaatcccaaactgcacagcctagggttggggacaaaaagcaaccaagccacaccgtagtctccacgtgcagccctgttcaggcggcgggtaggggggtgatgtctcatcagaagaggggcctgcctgtccaggtagatcctatggggccacaggcattggatggaggatggaggaggctcagggccagtgccgggactccagctcctctgggcactgggcaggcaatctctgttttctcttggccaaagaaccggaggcctcaggcctgccccggatgggcacgcaggcagggtgcatatgtacgtatgtgcctggcatggtccttgcctgagtcctgcctgctggctgacacggagctggctttcttccctggccctgttaaaacccagaatgtatcctgacagcattggaacaggatgcagagtaggggcctctggcaggacattaaacggcaccgagatagaaggaggggggccctccctgagttctcctctcccctccctgccagccccccagcaggcagccaggcctggacccaccatccagcaaaggctgacagaacagaggctgccaactaaaacctgggcacccggtggccaagaggctagagtttcacaaggacctcattcattcattcattcattcattcattcatttgatgagtgcttccagagcccacctatgacgtgccaggcaaggcggcaggcaggagggccaccatggtgactgagacagactcagggtctttccctacactccagagcacaggctagttggaacaagccagaggcgggcaatgctggtgctagggacatgagcaggggtgaagaagcccagcagggcccagcacaggcacctgagccagactcggcggcctcggagagacttcccagaggagaacgggctacacgtgggcctggaggtgaggtagaagtggcccagggaacgggtgcaggacagagtttcaggaagcaggcctggggtcagagaggcccagagatgaagagcgggtagagtgttgagcgatcggagcagtgaggcggtgggtgggcaggatcgggcaggtggcgggcaagcgtcagctgcctcaacatgcaggaggccaggctttgttctgagggcggctggggccttggagggttttaagccaggtcctcacagatttgccatgtacgaagagttcacccactacctccgctccaaaacagaacatttactgaggctccagagagcctggcagggtgtgtgcttgtcctgagctacagaggacttaaaagatgaacaaggggccaggcgcggtggctcatgcctgtaatcccagcactttgggaggccaaggtgggcgaatcacgaggtcaggagatcaagaccatcctggctaacacggtgaaacccagtctctactaaaaaatacaaaaaattagccaggcatggtggcggccgcctgtagtcccagctacttgggaggctgaggcaggagaacggtgtgaacccgggaggcggagcttgcagtgagctgagatggcgccactgcactccagcctgggcgacagagcacgactccgcctcaaaaaaaaaaaaaaaaaaaaagatgaacaaggagactccccctctctccatgcacaggcaggcaggtgggagatcgcaacaaccattcaccccagtgcagagtggttggcagggagaagagcacaactaatcctgcctcaggaaggctttccaggggaggtgacctttggatgagtcttgatagacaaaaagaagcttgccaagtggctataaagatgaatttaggccgggtgtggtggctcacgcctgtaatcccaacactttgtgggggctgaggtgggcggatcacctgaggtcaggagctcaagagcagcttggccaacatggtgaaaccctgtctctactaaaaatacaagaattagctgggcatggtggtgggcacctgtaatcccagctactcaggaggctgaggcaggagaattgcgagaacctgggaggcggaggttgcagtgagccaagattgtaccactgcaccccagcctcggtgacagagcgagactgtctcaaaaaaaaaaaaaaaaaaaaaaaaagatgaatttaggccaagcatgggtggctcacacctgtagtcccagcactttaggaggccgaggtggtaggatcactagaagccaggagtttcagaccagcctgggcaacaaagcaagaaccccgctatctctacaaaaaattttaaaaaattagcggagtgtggtggcatgcgcctgtagtcccagctactccagaggctgaggcaggaggatcacttgagcctgggaggtcaaggctacagtgcagtatgatcctacctgtgaatagccactgcattccagcctccagcctgggcaacaaatcaagaccatgtcttcaaaaagaaaaaaaaaaaaaaaagaatgtaaataatcacgctccttctgagatgtctgcctgcaaggtgggaatacgatgagagcccccaggcatgaggcttccttcctaccttccaggcccttctgagtacttagatcaacttaatcctaacaactatcctacgagaactccattagacagagaggcaacttgaggctcagactgtgaagcagatggccaaggtcaggctgctggaagctgaagagccaggattcaggctcaggctatagctccggagcccacgccccagcccaggtgctgcccgccccagtgcgctacggagggtcacacagagcccagctggcatcccaagcctctgccctcacgctaggcagtccctggggagattggatgaggggctcagggaccccccatgcccaatgtcctggctcatttgggtaaactaaggcctggcagaatggaagccattctcattacaccacaggccagggccaagtaggcagggctggtgggggtgggaggccggccatacccacctgtaggcacatgcggctccaaggagatggcagatgggaggggtggggagaggccttgcatggcacccactcccacctgtgcggcacgagagggagggaaggagcatcattaacacgacatggcctcctccccactgctcagcctctcccggaggatggtgaggggggaatccattatcgggcaaaatagcagctgctgacgtgaaaatgaaatatagattcaatacctgagcctttcagctcacaaatcatgcccccggcccaggtgacagccagcacagacgcccagctcagataacagaagggaggagataggtcggggacggggacagacggcacctccccaactccccagcccctccccctggggctcagggacccaaagcagggaccaggacccaggcttgtctccctcctgtccctaggtgggtgacgcaccaacatgcccgtggcctccggtgcacacacagggtccccaagcaggcagctggagggctggggtgcctggagctgccctgcctgcagtgattgcggacacgcccctcgcgaggcaccgcaggctgccacccccagcttgtgaactgggggtggccccagagctgtttgttttccctgactgaggggcggctgtgccacccccacactcctgaaatgggtgatgagggggttgggggaggagctgagcggcccacttcctgctgctgtccatttagccagcggttcgctcggcttttaggagggggctggcggtgaacccatccccgttacaatgcactcagggaccctgacaactaatttaatttaaaacagccttgcaataaaagctcagaacggaaaaccgccggtcttgggggttatttaacaaattgcctcacagataaatacattaaaatgattctcaaaccggagccgggcgaagttgaagtaaaattaagaaagttgaatcaaaatgtaaattaatggcattaagatatggcgttcaaattggcaggactcacgcttcgggagtgttggcaacggttctgccttctgttcaggtgatgtggcacctccacgcggtgtcagaaaccccttcagtcccaggcattggggagctggtggcaaggccaccccaaccccacccagcacccgcctgtcccactcttccgcctttggggacagtgatgcctaccaggccctggcaggctcaggcccagctgcccgcatgccctagtagctgtaaaatggaggtatctactgcattgacctcaccagctgctagcaaggaataaaagagtctgggcacggtaagggctggcacagattggagccctccacaaacatgaggtcctaggataacgatggttgtctcccttgcacatatttactgccgattactcttacagagccccgcattcccatttgattggcagataaactgaagccagggaagcccaggcagaatagatagggttccatgtgcagaggggcttttgtctctaccccctccagcctgcaccaagggtcctgatctcacgtgtctgtctctcccagctgagggcagagaagctgcagctgggacagctgctagcctgggagcccagataatgggctcagaacctgggagcacccccatgggcatgctcccccatcctttgtgggcctgtgtcactgagcagccctcccagcctggttgagtgagcctcggccttccccggaggttcacagaagtgtggggacttggcgggaaatgggcatccgtgtgaacccccaccccagagtggcccaggtgccaacagacagcactgggaacattatctagagctgcctatcctgatagtgccactcactaatcagcttgggacagaaaagaagagggattcctccgggggcagtggcaggtgggggtggggcaggatgggggcaggagaaggagccctggagaaccagttaggggtgtgagggtgacggtgtccagcacttctcccaaccttcgattgcaggggtcgagggagaggtgcggggagcagagcaggagggccactgcgcgcggccgggggcccgaggtgggcgccttcacctggatccgcagttctacctgacaccggagacagctctgaaccgcaggggaaggtgctgccaggcctggatgaggcacggctgtcagccgaagagcctggggggcacaggaggctgccagaggatgggggtctctctctggcccaaagccccaggagccagaccttctccctgccatctggctcagggaccctgggggtcttggagcccactccccaaggacaagctgctggccagtctggtcccctttagcctctggctctggggtaggggaagggcaagcacagccacaggaagcctttgtggggagggaggggctctccctgcccgtgtggtgcccctagctgtggggccaggtgtggagggggccagggctgctgatgcctcctgcagtggcctgaccccatcctgggcatggggaggcagcccctccatggcttccctgcaggggcacaggcagagcaggcggtggtggggctggtgacacccccgggcccggccccggcagctgtgtcacctaaatgcttcgccaggaaacctccgcacgctgccggccactgcagacgcagcagacgcaacaggcttcttatcgacagtcattaagtctttagcaaatggttcagagagaaaaaatagccacgatgaggatttatcttgggcgcccctcccagacctcaactgagaaggcacatgtcaccctgagcccgactcgcgcccagtgggatcaatgtccctctgcagggggcagagcagggggccaggaagctgggggacaggcggggatggtgagaggtgtccgccagaccaggctctgtgctaagcactccctgcagcctcttaatcctcagggcagcatgagagatggatgctgttatcactattataccccttacatagatgtggaaactgaggcccggagagaccaggtcgtgtgctcagggtcacacagctggttgggcgacagagatgtgaggtgaatccctgctgcaccaagtggggtgtctgagtctactgatcagagccctacctgggctgccagtcctcagcccagccttggggaaggaatcggagcctcctcatgttccctgggggcctcggagctgtgactgagaattccaatgatcctcctggcccttctgagcttgagctttctctcctataaaatagagccggccacgcctctccaggagaggcctccgggagggactgcaagggataaaacgccaaacaaataggagctggtgggaagctttcggaccctccttgcaggaatgcaggccatgggaaggctgcccgagagcagagctcgagaactcgaagcaagtcaggtgggatccagcctcaccctcccctctcccccggaggggcccccttcccagaggaggagaaagcaccataactaacactcgggctggggcctcaggggcctcccagctgatcggggcagatttaacaggactttgaaaaataaaaaaggtaaaacagcaaaacagctgcctgctcctcccgctgcaataaaaatggatttatttgttcgtggaatgaaatttaataactggtgggagacgaggcgtgaacaataatagttttttgctctttctcgttttggaagaggggagaggaggaaggaggaatgaatggggcccccctctgggacacttggggaaggggtacccatgggtccacatcttctaggggttggttaagtagaccaaggaggggctgtctttattccaggctctgaagggtttgactattcaatcctcagacctccacagttcacagagcggccatactcatctctttattcttctctgtgcacctgttggggacaccaggcctttgtctctgttgggacctccacctggggtggctttttgcctttgttgtcaaaattctactcatccttccccagagccccctcaaaataacctcctctaaggcccctggtttcccccagctgcaaaccaccctcccagccttcctccctaagaccctgtcaggtacctctctctctcagggaacccacagggttcccacccagcacaggcctgtgtggggtactcaggtgctccctgattccagctgggatcccagacctgcggtctcaatctctgggcccagcacagagcagctctctagcaatgtttgttgaatgaatgaatgaaactcacggatggagacccagtgtctacccttccccttaactggtatggccagggctggggctgggctgaggccaaggagagcattgtccccttggccagctcgcccaggagtcaccctggggcccatcccagaccaggggcccactctgggcagggtgggaaaccttgccccttagtttccttccccaaatgaccgctcttcccactacaggttctgtcgtatcacctctccagacctgtttccccatttgtgaagtgggaaccacagagccccccagcttggtggttatggggtggtcatgagaccaaggccctttgtcaagcaggaggccctagagtcacagatggcaggagactggcctgccccatcctcctcagggcctgtggggcctaaaggccaaggggtagggatggatctttaaggggcatcgagactcacccaggccaggctgtgggccgtgggcagtagtggcgagagccctgggagggcgcctcaagaagcaacccctaatctgcccagtgacacttctaggtcccggctctgcagtctggagaggcctcagctgccgaggggaacgggctggctcctgagccgctccagcaggtcgatagcaaaacaaacgcactattgaccgccgcgcgcactaaatcctcccggcagacaagatgatgtgagcccgaatcgaatcgactgctgaactcataaccgctggggcctgccccggctggcagccaggggtgggagtgagtgggagctgtggctgggcctggggggacttgggggtcgggagcagggtctgcttcatcctcagctgctgtgggatggaggggctggttctgcacccaacccacagatgggtacaggggtgatgccggccctggagagccaggccccagaactgtagcagcctgtggctgcaccagggcgagcctttgggggttgcctctggcagaggccgtggaagccagcaatgcaggaatcccagaagccaaaattagaaggtcagctgatccggctcatttaaaaaaaaaaaaataataattacataacattggataaatatgaaacgtacatgtggcattccataagttacgagcatgatgataaaccaggcacccgtgaacccgccacagaaactaataacatagcagctgcgctgcatcctgacgtgtggccttggccatgtttgctggggccttggtctccacaaacatcagatggggataacaaagccccctcgcccccatgccctggttatagggctgttctccccatgccctggttatagggctgttctggggattagaggagttaatgtcttaaagcactagaaatacattaagaagcaactgcttttggaatctggggttgatctctgtcttgctttgtgttgcagctccaccctgcatgtggctcagtggtccccaaccagagcgtctgagggtctgtgaaccccgaatcccacataaacctacgtgtggagcaggggctttattttttctcaaaagagtcaggttctcaaggtgaccttccccaaagtggaaccctctgatctgttctaactgccctgtcttctgaagggtcctgcagcccagagaggggtcgggacccacccacaggcagccagaggcagagccagcaggcccagctcctgacggcacagagccacttgtccctgctccagggtgcccagacacatgcaaagaggctgcggagggggccagggacccccaccgtgggtttctgagggccacggggcaccaggcacagactcccagggctgcctgcttctgcctaagtttaccccctcatccggccatcggtttcttcagagatacttctgggtacccgctctgtgctgatggagctggctgtgatcaaccggctgtcacttaaccagtgtcctgtgcccccagcagactcccactcccccatgcccatcctggctttgctctgaggcagcccagaccagacttgggggtcccagagacctgtctttgaaccccacttgcaacttctggcttctactcttaactcccttgagccttagtttgggcacctgtcaggtggacagcatgaaactggaggttggtggaaggattagctgaggtcctctgtggcacttactaattaacttaactaattcaaaattagtgccagttgcctgccgtgctgaggccactggcctggcccaggtacggcaggtgcaggccagagccagcgctgggggtgcacatgtacgtctgggccgggagcctgtgaggtctggcacatcagatggcatgcgagagtgtgcgtgcgcgtgggttctcgcctcccaaacacactccttggggagtaaaagctgggcctcggcagggtaaacactggagcttcccactgagaaacccagcagccgcatccagccctgtgttggggaggggggcccacagcccccagagccttgcagggccagagatgcagttggggacccggatccagcccagccacttaggggctctggggttgaagggttggttgggctgaaggtcagggagggaggctggggccctgagcccccagggtgctttggaggcccaggcacaaggcagaggcgtctggccaggccctgagtccccagcatgtctgctccagggccactgtcagcccggccagctggggatgggggtggggggaataccccctccccattctggccttgcctcctctcaaagaaagagtcatctagaatgtcacaagtagacatgaagctggctcagggcaatggtctccttttatgatggggaaaccgaggcagagagaaaggagggcttcccccaaggccccagaatgcagttcgtggggttctttcctctttctcaggtgtgaggctcatgaggaaggtttccccacctttcctagctgccgagctcctatgcattctgcaaggtcccgctctgggaggatttcccaaccactgccctctcacctctgcagtttctaatagcagcttcctgtgctgagctccaggggtgtggtccacccacaggatcccacgtgaccctaggaacagccgtgggagggaggacctgtcatgttatagatgaggaacagagctcagagaggttcagtttctggcctaaggtcacgcagcaaataacgtgtggagaagcaattccgatgtcacctccatgtccccgcaggccctccgtggcagcccttctcccattgctgaactgggctttccccaaggggggctgtgcccttacagcatgtccaagtagtgggaccccctttatcccaggagctagataccaccaaactgccctgtgggtccctgagctgctgccccagaggcccaggggtgaccaggctccaggcttctcatgaaacaagcaggttattgaatggagtcactccccagttcctggggcttggggtggggaagcctgtggcctgcctggtgagctctgacctcactccaggatcctgaacatgcccctttccatctgggagcctcctgcagggtcagggagatgccaccctggggcaaaaggggtcacttcccattaaatcagttgggctcctgaccactgtacccctctccttaaggttgaaaagggaggtccaggaattcaagaccccaccctagccacctgtgtgcggacagggggttctggctttggggaaggcctgggctccactgtggcttcaggaagcaccttggtctctctgggcctctttctctcacttggagaaaacggttggtgaggctgaccccacagggcagcgcatgagggtctgaggccatgagcctggaccattctgatccacatgccagctccagcctctcagggactcctggaccatgtctagataggctgggacctgcctggctggcccttggcccctccctccaggtgacatcccatcaccctgtttagacagaagtcatctttctgggtctaaaccgttccctgggcactatcccaagcttgacactttatacccatcatttcttcattgcaatccaatattgtttccattttacagatggaagcaaccgaagctcagagaggctaaataacttccccaaagctgcccagctagtaggtggcagggccccagctgggctcaaaccgagggaacaggcagaggtggagggatgatctggcctgctgccctccttccctcagcagccagatccttgtcccattccatcctgatatggagtgacaacctacacagctctggctgagaagaagggggaccccgaatctggccctggctgctgctgcttcttttttttgagatggagttgcgctcttcttgcccaggctggagcgcagtggcacaatctcagctcactgcaacctccacctcccaggttcaagggattctcctgcctcagcctcccaagtagctggagttatagacttgagccaccatgcccagctaattttgtacttttttagtagagacggggtttcaccatgttggtcaggctggtctcaaactcctgacctcaagtgatccacccgcctcggcttcccaaagtgttgggattgcaggcgtgggccactgtgcccggcctggccctgtcttcttggcatgctgctacctcaggctggggtgaaggaagccctggttccaagtcgctctctcaatccctccttcccacagcctcctggtggatccagcctgcagccagaggcctctccctcaagcacaggctggccctgccagtcacctgcccctgccctgaccccagcgaccttcccagctcccaacacatcacccttcccttgctgtgctcctgcccctccatctcaccatgcagggtcctgcttccttagcaagaccctccagccctcaccaggtgcccccatgaccctccactgcatgggtcaaaagaccccacatgccatgctctgacttggggttagggacagggacaggtctggagtctccctggtgcccagagcagcctggagaccgtgattgtctccagtgcccacagcagtgcttggcacatcacaggtggtcaactgtactggatggatggatggacggatggatggacggacggacgaatggatggatggacggatgatgtctcatctgtgccgggccctgtgctggcactggggtctggagacatagttgcttctctaagttctcggccagagaacttagtcatcctcacaacagccttattggacagatactatcattatctccattttccagaggaggaagctgaggcacagagagagacgaaatcgcctaagaacacacagctcagaaagaggttggtcctccatgttttcaggagccggaggtttgatccaggacaacactgcgatgagcatgttgttgttggcagagctagctaaggtgggacccaggctctgggctcccgtccctcctactgcgtgagcagccccccggtcctcctgcaagcctcttcctgcctccatcccttgccttcccaagctgccacacttactcatcggcttggggctaagacttcttcatgtggaagggatcagcacggagagaattttcacagctgggttatcacctcctaaaaatagggctgagtgacggatgggagctgtcgctaggcccttgagctgtggggagtagatgggagggagggagatagggcagggtaggggggtccacagaccccagaccccacaggcctcagcccagtgccctccacctcagtccagcctcgggtaggcctgaaccccttctccctgatgatggagaaactgttctgcagctgaggtcttcagaactgggtctgagcctccaggaggagctacctggaaaggcaccagccacagggacccagtgattcatttgcccaacaggtaccccaggcggccagctggaaatgtttgcatccagggggtcagggaggccagcaccatctctcaggggctgtgcttccagaagcaatgtctgggaattgggggcccctgtcacggggctgccctgccctctgtccctccccagctgtgccccgtcctcggattttccccccaagcttcttggtttttaaagacccatcagccttgcctcaggacccaggtactgatgggcatttgtggagacagactaggctgcaggccgcatgtgggaaggtgaggggcggggcagggggggtccctcactcccagtgcacatgtgcacacattccacctagacacagactgacgggcacacacgaacagaactcatagatggacgctcagaggcacatgctggcacacccccacctgccgtgcccccttgttgtctgggagcatcagcattcaaacaggtctcagggggtcactacccctcactgcattgccgagggaggagtccccagcccgtggctggactgggccctggctgggcctccggccgccgctcggacatttgggcaaggagtctcctttggctatgggtgggcttcaggagcccagggccccctgattggtggcaacagcagatatgtttaggcccttagaccctctggggactgtggcctgcagccagctaagccctgatgggcccgtgctcagcctggcctcctttcccctgcctcctcctcagcgggggtcccagacgctctccccgtgcccaaggcccaggcatcgggcacagggaggtacagcagctctgggaatggccttccctttcacagtcacactgccctgcgcacctgccggcttggggctgcaggcagcactcctttccttcctctcaacctcaaccctccttgtgcccagctctgtgcccgccccagagatgcagaaagaactggccatgcccatgcccagtaggacgtgccctccagaagggaggtgggcaggtgtgctctcagcacaggtcccaggcatgagacccctgccctggcctcttctccagcctggacccctgcctgcaggcctgcctcccctcccagtccctggcccgtctgcgttcagcagctgctctcagggggctgaacggctgcagaattacaatattaaatgcagctgcaccgaaacatggcctcaatccaattacgccaggaaacaagaggagccacttaggctaatctggttattccaccccggcctccccttgcagcatcggagggatacccgggaggggagctgtctgggtgggcagtggtgtgagcgcggccctgtgccccacagggtcccatggggggtggccacaggattgcctggccctctcctgaggtgatcatggctcctgcatccttgtcctacaaatatgtgctcttcaccgagctttgaggtgccccagcagcaaagggggagccaggctttgccctcagggagggcaccccaagctggggagacaggccacaaggaaacccaaaagacgggtgactgcagggggggaggcctctctgagcagggggtgtgggggcaggggccagcttgaggacacatagctggccgtggagactgtctcggcagaggggacagcgagaactcagagtgggagtttggcaggttccaggacatatctttatgccagtgcggttaagggtggtgaatggcggagacagaggtctgtagactccgacaaggaacatggatttgttctgaggggagggtggtgatgggactgggttcccaggggcttgctgagccgctgtgcggacagaccgggggcggtggggaggcgctgctgtctcctggcaagagatggtgcagtggggggcggtggacgggagggagggaggtggttggattcattggatttggaaaggacttgctgacgactgtgtgtgggatgagggaagagggtgtgtagggagccccacggccccttcctgctctggcatgtggcttgaggggtcacaggggctcccacctgtgctgtgtgcagctggcgctgcagatgcctctgggaatgagacagacaggggtctgccctctgggaggttacggttaaaggggagacagatttggagcaagggatgataggagggaagggggtcgttggggatgggggggtgtgcgaagacagtgggtgttgaagccaagatccaagaaatgagcagccgggcacgcaggggcaggaatggggcagggatgagaactgtgccttaagcagtcaccagcaaatgcaaaggcttggaggtgagagagaccgcagccgccacgggcacagagaggagtccagggtcctgggcgtggggtgggagatgggctagacggaggcagagttgggcctagaggcccctcactcaaagcctgtgggagcagagacccctggaggaggtgtggttggggaaaggaaggactggggattgggttcagggagagagtggggcgcacgctcagagaaatgtggagtggaggtaaggagggagaagaaggcacttccatctggaggtacagctgggtctggggaccacttggaccccaggaaggagccacagggagccagcaacagctccagagtgagggagtaccaagacagaagcttgtcttcagtcgtaaatgagggaggcagggttgtatcacaggaagggacaaactgacctgagatcaggcctcagctgtgttattcacttgagaccttgaacaagttgctttccctctctgagcctggaattttatttaattttgagatggagtctcactctgtcgcccaggctggagtgcaatggcaccatccctgttcactgcaacctccgcctcccaggttcaagcgattctcctgtctcagcctcccgagtagcggggattacaggcgtgcgccaccatgcctggctaatttttgtatttttagtagagacggggtatcaacatgttggccaggctggtctcaaactcctgacctcaagtgatctgcctgcctcagcctcccaaagtgctgggattacagacgtgagccactgtgcctggctgaatatttttctttataagcttagttcaaattcatctttaaacattgagatataactcacataccataaaagtcaccccttcaacgtgtagaattcagcgggtttttttgtgtgtatttacaaggttgtgcaaccatgattcctatgtaattccagaacattttcatcccctaaaaagaagcctcaggtttatcatttgtaaagtagggacaaaaataagcacctaaatcaaagagaggtggcgagggttgaacacaagacacccagtacagtgctcaacacgtaggcgttcagcaagggagggttacgtttatgatacagttacgtttatgagcctcccctccctgcatccactacacagacctcaactactgaggacctctcagacccaggaccggggaaggaggacgtgcagaggggacaggcccccggctggatccaggggtggcttttagagccagtggtgctcagagaggaccagcagtgtcctcgggctcagtgatgggagaactcttggggtgatggggagggaagaggcaccctgagcagccatcagtggctgtttctggcactgaggactcgggctgcaggcagaccttgagagaatccccactgctcctgaagtccctccagtctgttggaattatgtgacattgttgaagtctgtttaatgaggggacattctgccatcttcccccaaggttacacttcttattttatttattttgagatgaagtcttgccctgtcccctaggctggagtgcagtggcatgatctcagctcactgcaacctccacctcccaggttcagacaattcttctgcctcagcctttggagtagctgggattacaggtgtccaccaccatgcctagctaatttttgtagttttagtagagatggggtttcaccatattggccaggctggtcttgaactcctgacctcaggtgatctgcccacctcggcctcccaaagtgctgggattacaggcgtgagccaccacgcccagcctacacttcatattttaaaatcaatgaccatgaactcgcatatcctgaggtgtctagagtgctgggcgtgctcagggacgttacaacagcactgtggtcctgggacctgtcccagctgtgaccctcatacagggattggcagagtgccagcaagggctcaggacaagccctgcctggtacgtggggttcagtgaacatcagtgtaacacccccccgaccccatcgcaaaccacacatatcatgggtattatcagagcggctgaaggcacaggccaaagacagggagcaaggtgaggaaggggaccactctgggtgtagactctggtattcagtcggcgccccatacatgcttttctgcttgaaccatgcaggtgagggcgtgtggctgaagcctgttcctgcttgggggttggccacacagcatcccaactccaggtccagagccgagcctgacagccctcctccactgcctcctggagctgccggagagaggtccgggtccgttctccccaattcacagacatgaagactgaggccgtggttccagtggctgctcggtggtggggctggagcttggcagcatcctgcagccctctggactcccggctctcgagtgccgcgttctacctgctgtgttctaaatggacatgccatccccacagctgtgtcaataaagcagccatttacagagcgggcgccggatcccgtgacaggttgaaaagtgtgtgagctgcagcgtcctgggctggggcagaggggccgtggcgagaacagatggggctgtgcccatctccccaggccctcctgtggctgcgcctggagcctcccgggagggaggccagagccaggagcaggccagagccaggagcaggcgcgaaacatcccttaaatattggtgctctcggcagcactgggcccctgcttagcagaggatggctgagcctggggggtggagaaaatcttgcctcctgctctgagcagccagcagagacgctgggtggaggatgatccggggggaccgtggaaggcaggacgggggccaggagcatggctggagtgattgatggctgggagggagcctgaagtgggggcgtcctaaggtgaggggcaggcaggtgaggggcttgagggcagggctgagggactgagggccaggctggggccaagagctggtcccagggggtgaaacaaggctcggtgcctaacggtggtggccgtgggagtcagagctccaggcggaagtagggttcagattcaggtgaagcttaggggtccctgggctgaagacggaacctctgagtgcaggcaccaggtgggagggtggggacccccagcctggagccccagacccctgtcctgctccaccctgcaggcccctgggtctcacacaaggaatgtggagcatcctcctgagaggactcagaggggattcctgggccttggcatttgggacccctgaaagtcacctgctcccatttcccctgtttccctcagctcagacatcaccacgacccacagggcaccagacaccgaggtaggcagggctgtgcctgctccagcccagggccccctgcctctctgccctcatctgtccctgccctgacctctctctgccttccttcctcgtcacagcagctgccgtgtgccattggcacctcctgtgtgccaagtgctggcttagtctcccctggcgttttctcatatcccattaacaacccacccagtgggtatcatcatccccatttcacaggtgaggaaactgaggctcaggggggcaaagtgactccacaggccaaagatgaatgagtaaacagcagtataatatgtaaatggagccgggtgcagtggctcatgcttgtaatcccggcactttgggaggccgaggtgggtagattgcctgagctcaggagttcgagaccagccttggcaacatggtgaaaccccatctctactaaaatacaaaaaaacagctgggcatggtggtgggcacctatagtcccagctactccagaggctgaggcaggagaatctcttgaacccaggaagtggagattgccatgagctgagattgcaccactgcactccagcctggcaacactgcctgggcaacacagtgagactctgtcccccaaaaataaaagaagcaaatggcaggatttgaaccccagcctgtccgcttcgggtgcctggcttttttccatcccgtctccctccctcctcttgatcctctcgtattatgttgtatttctgtaagctgccacaaatcctttcgagaacgagccgggaataaataaataagcatgtaagtgagtaatgagaggccgcagtgagatgccaacgccgggtcagagctaggacctggttatcaaaataggaatgggactcgccagactggctccaggtcttctgctagtgtgtggaatgggggttcggtgactcctgaagggccccagccccaaattcccaaggtcaaggggtgagtcagcaggggttggcatcaacagaccgacggatctgccagggccggtgaggggcgctgacctggggggtgctgggcgagtgtgagcagcgtgcaggcgggcgtgcggccggccccgtgggcaggggcacatatgcggcagcccggcgctgctgtgggctgacatgaagagtgtcatttacacaactggaacacgtgctgggttccggcctttcactggtccctcaggaggcagagctggtggtgaggcagagactgaggtttccatagtgtgtccctgccatcctgcacacgggcctgtgtgtgcatctatgagcgtgtgcgtgtaggtatacctgtacatgagtgcatggcacgcgcgccttctgcagtcctggaggatgctgcctccccctcctctcagccccctcccaggcctggggcaaagcagtgacagggactcagcctccaaaggtgacacggctatttccatgcctggatcctggccagaggcagcaggaacacatgtgtgagagtgggggatgcctgtcccccagcctcgaggagcccctgccacgtgctctgcccacgtgcatttcctgctctgcccccgctgcctgagctgcctacctttcccgcgaagccccctccctgcactgtgggcaggcgctgtggaggcagcagcaaagaggcagcgagggtgggaggacagtgagccttggggtcacggggcctgggcttgggtcatcgctgctgcaggcctgaggcagtttctttgcctctctgagcctcactttccttctctgtaaaatgggtggacagtacccacttaggacagcgcctagaagggacccagcgcatggcagtggggtcaaagagtgatgggcaggttgggcagggccagtcaggagggagcagggctgtccacgtgcccgtgctgcttcggctcagccctaggccacacctcgtgccttggtgaccccagcattctccctcacccgccagcccagactgggcaaccaagaaccgtagccccaaggtccaaagaggtaatgccccggcccgggaggggcgcaagaccacaggactcacagggagagctgcgtgtgtgggggctctgcagtccccctgctccctccagccagccttggtgctgccctcccacaacaagggtttccgtctatggggaggccacatgcagacacagttctaactctgccttactataacaatgggtcctattatccccattttacagataaagaaactgaggctcagagaggttcagtcattgcacagatcccccaacatatcagtaggtttcaagcccatgcagtggggcaccagggaggattgggggttctgggcagaggatggggcttgagggcagagggcagcttggaggagcacgcccgagtggacaggtggggagctggaaggcttagcggggctccttggagagcagcgctgtccctgggcaccacggaggtggttcctggccagagctgattctgtcctgttcaattttgaactgaagtgcaaacaagcctcagcgcccgctgctcccaccccaaatcgaattcgtgctaatatttctctgggggcggcgggctgcctgccttccggggacggagggcgggggagactggcagggaggccaggcccaaccacggggctgccgggaccaggccatgtgtctggggcggccggcttagctggctgggattgtccacccaaattaaattttaacccagctcataaatcttccactaagtacgtcccctgccgcccgcccgggtccaccccaggccgcagcgtgggccagcacagcgacagccttgttcctctgccccacatggctgtggggaggctgggcctacctgccttgggaagtgggacggtcacccacagacaggcccaggggcaaccttgcaggctgtcccaggaggaagttcagtgttgtccattgggggcctgcttctcccagcaaccttaacttctcaggcctcagtttcctcagctgggcaagtcggggaataacagcatccccagcagggatgcaggaggaataagagatgatgcagataaagtcctggggggtgaggaaagggggcccttctcaggggccaccccacccccacagaaggggaggctcaggtgcccttcctgcgcccccagcccctgcctcagcagatggttagtgggcttgcagcctcaaaggaggctcagggagggagggtgggggtggaggtggccacagcctgtccctgccctccctccctatggagccctgggggctgtgagctgagtcggctgggccaggccatgagcactcagcactggtggggtgggtggctgcgcacacacagccattcaggggaagccgggactcaacagtgggatcccccagggctggagtggggaggaggggcttagctcagagcccaccctgccccaggtcttgcattcggggccagagggaggcttcctttgttgaattgtggttttaggaggcgtaaagtgcataccggcacctgcacagcctggggtgtgcagttctaagacctgtgaatcttacatatgcatatggtgcccttgtgactacccccgagctcagaggatggaacattccctccccacccccagctttctactctccagtccaaacctgtccctctgctctccccatgccctcaggaggaagtccaggcccttccctgaggtcccctagctgaccgccctgccccaggctgagttgtctcaggacagccacaaagccagccttcctcctgcctccgggcctttgcacagcggttctgcgactggggtgctttttccggcccctgcagccccacttctgtctgagactcctattcatgctccagggactcacatcatgtgttcagggaagacagagagggggagaagggcatgaagaaggaaggttctcgtgctcacagtacagagatgtagacacacccagatcacccaagcagctgtggagctggacgtgagccctcatccgctcctccaactagcccgtgacttccacaggcggtgctaggggtggcggctggggatggagctgggaggggaggtagcaggcagcccgctagcccttccctgtcctggcaggagctgtcactgcctctctccttgatggcggggtatgaagagaagccttttgacgcagggagatgacccctccccggcctccacctacacagcagccacgtggccaccctgaacagctgccacagtgaccgacaccccctggatgtgtttgtcctcccacagcaaagcacaattaacatccccactggtaaatgatatggggccatatttcacctggacccaaatgtgggccacagaggcattaaaataaatgacggcacggttcagtgaggtctccgattcttggatctggcagaagtgcacctgtgcagcgcccccactgctctcctgggcccctgccccagttccatgccctctgtgcagggaaatcaacctgctcctgtcacttcggatgtgggaacagggtccgccacccagacctcaccccaaccctgccacccctgccacccctgccacggctgtagccctgaccacaggccggttgtccccagcccgaggagactccggggtgcgtctgcctcccaagaaagccaggttctctgggaaccagactgggcagggtccagttggccacacctctccacagttgccaccccttgctggagctctgggcttggaggcaagcacgcagtccccaagaaatgggcgcagctggtaccagcatcctgcagcttcactcgctgcagcctgcaaggctggccttgcccgcggccccagccaccctgcaggacatgcagccacgggtccttgtcctcatattcactctcctgtgatgatctcatgatgctgcatgcttggcctggtccttgtggtccctcaccctgtccacccagtacacagagcacgctgtgcacgtctgaatgaccggaggctggacgcctgcccagggctggcttctctgcactgtggggtccacagaccactctcctgggggctgtttcaggagatgaaggcagtgggtacacagggcttagctccttctttctgcgacaggggagaggtggagaggcctggattgtgtcaggaggggaggccgggcctcctcagctgttcgaggggccagagctgggagggcctcgagaggggctgtggtgtggaaacaccccggtggtggaggccctggtggccctgtcactggctctctgggcctcccctggctcttcccataggcacttggcccctctatctccaccccagggccccaggagttctgttactcagaaagtgctctgcaaaaataaagttgaaccccgcagggacccaaagcagccagactcctccaggggtgtagggtggggaggttggtaaaagtcgctgcctcctctggggagggaccaggcaagcacccaggggagccgtagccaggagatggggggaccttgcgtcactaggctcggtggccaggcggggccagggaggggcagcatagaccagggggcagtggggccttgggcgtgactgtctgcgggcctcggggtcctcacctgtggaaggccggcacaagcatcctccctgtgagccctgcaggtgcggctgtgggcctggggcagggcaggcgctcaggagctggctgcctagcctccccttcctcaccaggacggcagaggctgactctcctctcacctgcaggtggcaccaccctttacagtgtgtttctcctggcctggagcaggtctctcctcctcctccccgggttttgtttttccatcagcacacaccaccaggccacccttattggttgtgtgacccacggcaagtcactcgacccctctgggtctcggctgccctgtctatgaaatggggataatcgtgtgtttccccaggtcactaagagcacgagatgaacgacagcagacagtaagagactgaacagagcctggcacatgatgggctcttggtgggtgggagtggctgttctgttattacttggcaggggcactaggcaggatcgcaggcggaatcgggtgtattgaaggtgcggttcacaaagtcatgggcggggttaggaaaccaacaggggaaggtgggcagctgtcaccatggaggctggggaggaggcagaggttaccagactcagagagagccaccgaagccactgggagggccactgacaagagagggaagcctcaggaactcgtgccccgccggctgtcctccctccctccggcctgctgctgtggctcctctgtgaacccagccggaaggcaggagcccaggagcccgctggtgaccagcagccttccaggcacagggcgggtcggggagtgatctgacgggacaagtgctctgctgaggggctggcattgcaccgcggaggtgagggccccgggctctgggtgggggagcagggcttggtgctgctgtttaccagctgtgagaccggggtagggcagccaagtgtcccagtgtgccagggattcggacccaaactcggtcaaaatagggcccgcaagtcccctagacctggggcaggaggcttatcatctctgagcccagattccccatctgtaacatggaggagtcgtcacctcacggagcaggggtgggattcaacacaggtgtgggtccagccccctcccctgactcccccagggcattctccagcctcctcctgttatccatgcactttccttcccagctgccgggtcggcagccacggaccagagaaagcggctgaaaacttggggagactgttctcagagcaaggaactccccagtcccagcctggccccactcctggggtggaggtgatgccttgagagaagctggcccagggcctggacaaagtggggctcttgagggagggtgagaggccctgagacagtgccatcggggaagctgccagtcccgtgggggcagggctgagaggagggtaagggctcctaatgccagtctctgtgcccactcataggtgtcctgcccccagggaaagaatgaggaggatgatggtgctggagtcgagaccagctctgccctgtgtgaccctgggcagggcattcacctctctgagcctcagtttgccccccacgccctgtaaagtgagaggattggataagatggcgtcttcattgtttcagcacttatgacaaggccctccatccaagtaacaaacaaaagggaaacacaaagcctgtgactggactcaacagctgtgtcatcctgagcccagaaccttctagaatggggctgggggaggggaagatatgcaccctctccccacggggctagggactcatctctgcctgtcttcccaggccccaggtttcaggccccgaacagcctgagtccacagggtgacagggtgtgggaaaggccaacgggcgtgtgggtctccagcctttgctcatcctcgggaaatgcatcgtgcgttgcttttcccgtctgggagtctaatagtcagcagttatttatcgtctcgtttcttagtgggtaggaaagccacaaataagtaaactcaggcagcagggcacaattactgagcctggtgctttatttcctcaactcacctccagcccgggcagcagtgggtcgataataatttacgaggcagcccctgaggtggaggaggaggaggaggccaaataaccacatttgcttccccgggccctccctcgaccggctctgcctgctcacaggtggctgggccaggaggctccgggatgaggcaggaagtggaggctgtggccagccatcgccgcaggaggggtcccagctggagcactgcgcagccccaggccttgtccccagccaccaacagaccacttctctgaggcggggacgtcccaagactaaaatgggggcaggggtggcagcgtctctccaccacatcccaagactaaaaggggggcggggtggcggcgtctctccaccaggcacttggggtttgtctctggggctctgcagaagcagagcccgagtcgggtccagccctgcactcccagggagccctgagggacgaagtaaagcaggagagggcagggggagggacagccagggtggtcacagtttggtctgccctgtagggggcactggcagaatctgcagcactgacctctgacctctgggtcagttggttactgactgctgactgtgcctaggagaagggggaggagggaggggagaaagaagacagaggaggaggagggaagagaagatgaggagggacatgggaggaggaggggagaagggagaggagaaggagggaagagagggtggggagggggcatgggaggaggatagaagagggatggggagggggcctaagactccagctcctggggcaagggaagtgggcagtggcagcctccgctgcagggtctgcagcccacggagtgtgggacagagttcatcctgcctcagaaggaggctgggatttggatttcatcactcacgtagctgatttcatcacgtttcattttctgtcaagtttcctgccgttacaatctcattcattcctctggggacatgaggatgccaggtagggaggttggggggcgggtggcaccaccgcagcttttgccccagggctgcactggtgccagggaggtggatgtgggggacgagcctacaggggtgaggctggggtggggttggggttggtgggttacaacagtagctgaggtgcatgcccagggagagctgggccagtccttcgggcgtttgcacagcacctcctggagtccttgccacagcctaggacgttgccgccaccatccccccatccgacagataaggagactgatgttcagaagacactcggcccaaggggcacagctgctgaagttgcacgaggggccccaactccccacctggacactggccattagcactgtcctgtcccctccagcaaggcttactgttcttcccacaacagccctcctgacagtgggccactaccccagtcccccaggaggctgctgaggcccagcacagccaaaggcaggagcaccagagcggctgctgggccaatcccaccatctggccactcttctctgtgtcccgaggcctctctctggggctgcaggaagcatactgagggcagtggcgtcactctgggctctcaggtggtagaggacagcggggctgccggccctctatccccacgtgatctcagctcctgagggtcccaaaaaacaatcctcccacccaagccaggaccatagcacactctggtgtattcaaaaggccaccgtccttcctggcctccaagcttggcccgtgttagggtcgccgtggcatcccgagtgggtggagtcactgcacagtctcaggctccaaagagggctctaattcctacccactaacgtctcccctgttcttgtctttctgtctgcctcttaaaaaaattaaacacggatggtttcatatggggagaattagtattccaggcaggccaggggatgtgatcagaatgtcaaggccagagacacagagcctgaagggaaggaaagaggtgctgggcctggcaggggtcctggggtgggggcagagggctctgaccctgcctatggagggctggtggggcctcccaggggcctatgtgccgctggagaggttgaggttgggtgtggccagaggtcttgacacagcatccacgatgggaggagatggggccgctcagagaccgcgtgtggtcatgacacgtgccttcccatggcccagcccggctcctctgccccgtccactcccactctcattcagccctcacttgctgcaggcacgtgtgccactgtgtgccagccaccagctgggtaccagggaggcacagggcagggacaggcctatcctcaccactgcatgtcaccagcaccaggcccctgcatggcacacagcagccccttaccaaaagcctgagtaaacgggtgcatgaacacccacagcatctccccaagcatggtttgaagaagacatgaacgctgggaggttaacacgtgtcaccaaagacaaagtcaatgggtaaccgctggagtgaacaaacttcaattggcatctttgccgcaggacttctcagatcctttaatatgctaatgtgccctgtgaccctgcagagggagttcggcttgcagcctccagccaacctttagtccctggccacaccggagtggctggtgtggccttgaggacccggagtggagagaggagtgagtttgcatccaggctctggagcagaccccctgtgggaccctgggcaggctcctgaatatctgttttctcaggtggaaaattggaatggtaataacagtgcctgtgcattcagtgaggcgacgtgtgaatagtgtctgcctcggacacaacacagggcggccactactgttgttagtattattattattatccacatcaacatctcagctctgtgtgcctgggccatctagaactcgatcgagtcagctgctggtgttgtcactgctgcggacacagtccttacccgtaagagctcacggcccattgggaaaagacaattatactccccggtggagagggcaagggctgagtgagccgggaagccaggcctccacctggcatgctcaccgctgcctggcatctctgccagtggccatgtagactaggtatggatgcccctggtgggggcagcctggcccacctttgggcatctctgcctggtacagatttctttcttaactccatccctcccagtccttccctcccagtccttccagttcttgggcctcccagaacaggtcggtcttccttctctgctgaagacaggagactgccctcttccctggacagggctgaacaagccccaccccctcttggtcatggccaaggtcactccccacccactgggcctcccgctctgtagtgtggctgtgtgtctctaagagcccagaacagaacagtgttctagtctggcctggccagggtggaaggagggaggaggtggtacagtgatcacctccttcaatataccattgattcctccattaatacagcctgtgcagcaaccagaagctgggggcaaggtgtccctctgtgtctggtacagtgaatcaccttgctctgcagaagcagaggatagctggctgatagaaagcacggtgccaggggagcctgagaggccaaagctaagcaggccagggccgggcgcagtggcttatgcctgtaatcccagcactttgggaggccaagccaggcagatcatctgaggtcaggagtttgagaccagcctggacaacatggtgaaaccccgactctattaaaaatacaaagcttaggctgggcgtggtggctcacgcctgtaatcccagaactttgggaggccaaagcgggtggagcacaaggtcaggagttcaagaccaacctggaagacggtaaaaccacgtctctactaaaaatacaaaaaaagttagccgggcatggtgacaggcgcctgaaatcccagctactcaggaggctgaggcagataattgcttgaacccaggaggcggaggttgcagtgagctgagatcatgccactgcactccagcctgggcgacagagtgagactccaacttaaaaaaaaaaaaaaatcccaaaaaacaaagttaagcaggctggggacaaggaagggtcagggaagcttcctggaggaagaaacagttgtcagttagaaatgaatggcaggctcctggagtgaaggcctcctgagtcatccatccctgcccctgcctaaccgcaggctgactggcagagccattgggtcgcgtacgtcatggggcagactccggaggctcagtgtgtggctgctgcgggcgggaccatttgtctttgggaaaagtggttcagggaggctgaccacagaggccagaggcctctcaatgctgacccctatctaccaggatttagaaagtcacccctgaccccacgaccacggcatccttggctgtgcctggggttcacaggggaactgaggctgaagcacttcccagaggtcacatccaggttggggggcccaggagtggatttcgccgaatgtcccatctgggcctgtgtcccaagaggggaggtagccacaggtttcccagccccgtgtgctccaggagtgaaagtactaggggcctcgttagctgtggcttcaaagagcctcgttattaacaaaagtgtgccgcgaatgctttctcttcctgcttctctccttaaggcaggctcccaaatgaaaaggaaaatatacaatgagaggcactaaggaaacctcagaggaaagccaggcgtctgcaaagatggggaaggaacgacattccactctcgtgtgaggtgtgggctggcttgcttgctttatttatttaaaatagtctctctttttcccccattcctcccaattcagctagtctctcaggcgcactttaagttcttttgaagtgttacaaccattttctcctctttcaattaacaacaagaaaaggaagctaatagcttcctgagccactcgctgtaaatattaacaaagtctggccgcctgggccgagcgcacagcattgctctcggccagagagagcatgtttatgggaaggagggaaagggtgggagatttccaacacaggcaaaaaatcccttggcacaggctcttgctggtgcagggaaaccagagagctgggagctgagtgagagggcacctgtccctgggggctggaggctggcagagctggtgggagggaagtagagaactgaggttgctagtggatgcttctggaaggaaaggcggcttcccccagctgcacctgagtaactcggatgatggcatatgtgtggactggaatccccagctcacagcggaggtctgaggagggctgggtttctagatgcagcaggcggagggaggtgctgcacactggacccccagcactagcacggagcccttgaaggaagtgagcagggggctcctgaaataggccaagaggggctccaagtcaggggttgagacctgaatggaggagcgcgaggctgaggggagggtctggggaaggggcagccgagggagggagctgactgcctttgggcagagcctgggttctctgacagctcctcgctttctccctggggagtctccagcagtggtccccccaccccccaggggcccatgagcctgcaggatatgtcgcgctgcagccagcacagtgctgcttcaaactgccacttgagagctccagcgtggggacagcgtggggcccacttcacagccaggctgccaggagacgctgtgagagtgcccagaccctggaggccaggaggggaccagggctgcccgccggctccaccacctgccttggccaagggccagccaagagcactgtgacgggcaggcagggggtcgaacagccactgttctgccgacaaaagcaggccaatttcctgaaagaagaggttccggccttggctggtggcgccaggttcatcaccccgagcttcctctaggctggacacggtccctaatgggcacgggcgacgcattacagtgaggtctgccaggtagagctggcaggcaagtggtcgttcctgtcccctcttttttttttttgagactgagtctcgctgtgctgcccaggatgatgaagtgcagtggtatgatctcggctcactgcaacctccgccttccgggttcaagcaattctcttgcctcagcccaccgagtagctgggattacaggcgcctgccatcacgcccagctaatttttttatttttagtagacacgggggtatcaacatgttggccaggctggtctcgaactcctgacctcaagttatccgcctgcctcagcctcccaaagtgctgggattacaggcatgagccaccgcaccctaccctctcccccttttgtgcctagagttgctctgtgaaggggcaggctctggccgcagtgcccctccctgaggggaagagggcaggcctgtggggggctgccgtgtccccataccctccaagcacactgccagctgtgtcccttcgagggcctcccccggcagagctgagagccgatgcctgtccctccgtgagctgggtgcgagtggcccttgctggtcccccgctcacccactctctcagcgtctgggcccgggagttcctgcctacccttgctgggaggagattgcaaaggcacaagagcactccaggcggatgagaactcttcaggcgcctgcctgctcctgtctccctgctgcccggggatggcggtgcccactggcagctgtttctaggtccctgttgctcagctgcactgtgaggacggcagcttcagctagggaaccctccccctctgcagcatcctgagcctggcagaactgggcctccagaccccccagaaagtacagggagggactgctgggtccagtggggcaggtagggaggggcaggtggctacggtctgcgcccaatttgggcttctctgccaactcagcaccaagggatgggtgaactcccaggccacctctggccagagctgcccacatgtgaagggaaggaaggaagaaaataaagaaggggagatgtcccgtggcaagagaagctccgtcctgggcgagtgggccccgcacccctgaagtgccctgctctgggcgctgcctgctgagtttctctgatggccatcttgagggtgggcgctggcaaaggcccaggcccgccggccgggcggcacagactcctgaagccacccacggcctggctcgcacactctcgcaaataccctgaaagtctgggttttgtcaggagatggtttaattagcagagcggaggctgggagggttcgcaccacacaagcaggctctcgcctccgcctcttctcaccctgctactcgggtgccatgcagcggtgccaagcctgggggcccggagcgagtgggcagggaatggggtgggcccatctcacagggcagaaggcacagcctccagaggccttcctgctcctgctcaggcctggggctgcaggctgcagatcaggaccaggcttggagcccatagcaagccggctgtccatggctctcttggtggtgctcctgggagcactcagctgccctccagtgaggagaaggaggcgggaacccactcagcacccaggcctgtcttcagggagtaaaacctgggggcctcccaagttggccccttcccttcaacccctcactgtatgaggtccctaccccatgtccctgtccctgttcctgaggacatggtcccagcttttcactggtcctctcctgtgcacctgggcaccttccaggtctccatgcagcagcgagaacactctttctaaactgcaagtctggtcacgctcctccatgcctcggcaccctcacagcctcccccctgcccttgtacaaagaccaggcccctcagtgcagcattcagagcgcccctaaggccaggctccgggccctgcttcagctcggatcacggccctccactcactcagagctctgggacactgacctctcactataccaagccctcccacctccagtcttcacataggctgttccctcagcctgaaatgttcttcccgtcccactcccaacatgctgagcccattactggagcggtcctagcccccacacggcaatgctctccctgcccccagccttctgtctccagtgccctcgggagagagggaataagcagcccccagactgctctctgcaatgggaaagaaaggaacaggctctgtggatggccatcctggtagggggaagtcagagccatggaacaaactccagtttgagtcacaaagagccttttcatctataaaggtcagatacagatgctgacctcagcctggaagtccaaaatgaaagaaaatcctgggtctcctagctcgcaccagctctgacctgcttacaatgatctaaactctgccctctttgccacagggcagctcttcccagggagggggcaggcatgttgttcatttaaaacaccacttcgctaagtcaccagccataaagcccacctgggtttctagcagcacataccagccatctgattaatgacacatacataaaaatccatcccaaagagccaaaggttgaaatgaaacaggagggctaattgctaatataggaattaatatcagagagctccgatctttaaggcagctatgaactgtaaagctgagggcctgaggatcgtttctacttcgggaggaagccctgagtgccaagggtgggcagtggctctagaagataggcaggtggtcaaggggaaacacagccagacctgcctccctctggattgccactgagctcacatgtgactgtcataacatgagagtaccccagaaccacagcacagcgtcatcttctccaagaagcctccatgatccaccccactccccgaaggctgggcaaggcggggctcttggctcccacactgccctgtgtgcgtctcacattgtagccctctgaaaaccaatgccctccccactggactgtgagctcctggaggatgagggcatctctttggatccccaatgtcttgtacaatgcctggagcatgattagactcagaatatgtttgctggatggagagatgggtagatggaaagatggagaaatggataggtggagagaaatggatgaatggagagacggatggatgaatggacagacggatagatggagaaatggatggatggatgaaaagatggagagatggatggatggatagaggtgaatagatggactgatggagagacggatggaaggatgaatacagagatggaaggatggatggatggagagataggaggatggatggagagatgagtggatagattgatggagggatggatggatgaagagttggaaggatggagagatagatggaaggatggatggagagatgaatggatgggttgacagatggagagatggataggtgaatggagaaatgagaaggaaggatggacggatggagaggtgaatggatagatggatggatggatggatgaatgaatagagaaatggtgagatggagggatcgagaaatggagggagagatggaaggatggagggatggatggatggaggggtgcacaagagagcctcaggagaagcccaggacccctcagtgcagtgtttggtggatggtccgtttctcttgcgctgtcttggagtagtgcagcaagaaggaaactggcctggagtttgaggccctgacactgctacaggttgtataaccctgcacaagtcctgctccctcttctcagtccacacaatgaaagtggtcctccctgacctgctagccatgctgtcttcccaagctcagggaagatggcaaggcagaaattactgggaaaggacaaggtgcattgtcccctggcatatatgtatgggcagattcggccaaaacgcagagggtggtgcagagatgtgagattgggcacttggctttctttccctcctttcaaatttcttttaatacagttgtgatgtgattgacgacaacaaaagtagaaaattgtgtaagcatctcaaagtacttttactcaaaatggaagcttttatgatgttgactcaaaaaatggtttattggttttgagcacagagaccagacctggagcctgtgggaacgggggaggccaaggcgaggagtgtaaccactaacttcacacggcatggtctccactcactcgagccagaagggtggccactgggggtgctgtggctctggcgggaggtgtctgccaggcgcacgcatttacatatttattcttgggcctcctttggttcagtgaatgcaggtggctactaatgatcatcattatgcgcccacacaagggaagagccacagtgctgctggagagctcacacctcccaaccactgccagccagactcacttggaaaaccaatacacaccccagaagcctgagaggccccacttatccagggcacagacgctgaggagcccagtatcccagcactggggttccaggaggctctgcaggccccagggaaggtgggggtgggggctgcagcagggaaggtggactgaggacatacaaagctggacgggcaccaagagcctcacttagtgccttggttttctaaatgagggagcagatggagagtttggtgggtgcatttattaagcaccaactgcatgcaaggcactgagccaggtgctgggggatccagcctcaggtcctcccttgaagccagggagacaattcttttcatgctccgttgttgctgtcatggttcacaggaccacacaagccaagcagagggtggcccattgcagggagggagggatgacgtctgcatggattcttacagaaggggaacagtacagtgaagggccaggctggagccagctcagggcattagtgggcagtagtgggagacacggctggtgggctgggcagggcccttggagactactgtaggagcactgcctctatcctgagagctatgggacgctctcaggataaagccgagaagctatgggaagggtctgaggtgaacacaccagtgggatgaacctgcctcctttttgggttcttaatttcaaaagcagagctcagtggtttctctctttatcgggaggcagcggccacagctgactggagcctctgggctcccaggacacggcaatcatcctctcaaaatgccaaggcccgctgcccctgccccacccccatcggtataaaacaatttctgcgccccggccagggaggcggatgacctcactggactttttccatctctcgctttcatggagaaattacaatttataattggatgaaatcacgcgggtggtaatagcaataagggctcgtgctagagccggccgccctcccgccgcgtgcagggactctgtcctcatcttccctcctgcgtaagccccaccgtaccccttccagggcctgtgccccacctgtagtattcaccaggcactggccattcagaatcgatgtcccgtggggcttgctggctctgaaacctccttcttcctagggcagcttgtcccaagaaaactccccctgccaccctgtccaccccatcagactcagcctgcacaccacctggctggcacacacccttcccaaatgccttccctgccaggctgtgagccccgtgggcagccaccccccatctgggtgctgggcttattaaaacatgaaccctaatatccctgtttttatttgtaacggcctctgacaacaagcatttctcaaatcagccaccttaggccctacaaagaaaagtgcccagatgcagctgagcccatctggatctgatttcaaaccagagtgagcactctcagatgtgtaataaaagcccttttccaaagaggggttcctgcagggggaatacagacaccagggcgccgcggcccttccacatgccgcactaatgagaggtgctggggagggctcggggttttgttttggattccagaacagcctgccctgccctccgtctgtgtggaagaggagggcggctgcgggtgttgaggactgaccccccacctaggaagtggggtgggcaccagacagaggccagaaacacggagacccaacttccccagttccctgatggtcctgcttcccatggtggggaaaggcagtgcttgttctggaagcccaggccatggcggcccagttggagcctttgaatgacatttagcaagaagagcaggtgccgggggaattggagccagctctgggctgggcggttggccctgcacggccaggagctcgaaaaacttcatttttctcttcccagtccttccacccccagggagggaaaaccaggtagctgcaaggctgggcaccatgcatggccaattgtcaggatttggaaagaggcaggagatagggagaataaccccagccccttccccggctcataggcaagtggcattaagaaaaaaaacaggatccaggctgggtacagtggctcatgcctgtaatcccatcactttgggaggccgaggtgggcggatcatgaagtcaggagatggagaccatctggccaatatggtgaaaccccatctctactaaaattaaaaaaaaaaattagccgggtgtggtggctcacgcctgtagtcctagctccttgggaggctgaggcaggggaatcggttgaacctgggaggcagaggtcgcagtgagccgagattgtgccactgcactctagcctggcgacagagcgagactccatctcaaaaaaaaaaacaaaaaaacaggatccaaagcaaagggggctgcagcccagtggccctggtggatgttgtcccagtacggtccctcatgtctctgggcttaatcactggtattgtttttggcaggtgaggaagcaggcagtgggcgagaagatggattcctttttggacagacaagaccagagagtgaagcgggaataactcatcctccctacctccccagcaaggaaacctctacaaacaggagcagccaagcaggactgaggcccttgccccccaagcatcttctcaaagaagggcatgtgggggcctgacagctcagctgcatgtgtcagcagctccagccccaccatgaacatctgaactcctcagcggggtaatggaccccctcctttcccccggagacacagcctgagtggcaggaatacagagcctttggagagtggctccctctcagctccgtcatgcaagaacactctctgcacccagcccattctgccaagtgacttaaaggaattaaaaaaaaaaaaagccttggtaaacaaaaagggggtaaaagccacgcagaggcccttcagaagaggtggcgggctgcagacaaaagggcaagagttgaaaagggctgtggaggtagcaagcagcagaggccaccctgctcagggctgggtgccaggccacagggcatgcccgacgaacagggagtcggaaccccctcaggccaccctcgggagtcctggggtccagaggggtgtccctgtaccccttgcacacaggaccctcactctgcagggataagccagctgcgcctgcagcctagggtgccaaggaggctgctgattgtggcccacagcctcatctgaacgccaggagaccaggataccgaggcaccggatcccctctctgtgccctggggagccccagtgctgcccagtcaccccagggctgaggtctgcgtccctagtggtgcaaggcctggtaggaccacggggcagggaatgtgagcgccatctgagctcacggtgtcctgagtcgcggcttcgtgactttggcaggggcctccggaccagtgaccccagtcaaacccagagggtcttgggcggcagcgacgaaggaggtaaggcccaaggacaagggaagagggacgcgaattcagaagggctccagggtgggcccagggttcctcgcacccagacagctgggttgcaccctccaaaggccccttttcccagccagagctccacaggtctccaagggtctgcagctccatcccacacacccactcacgcagttcatgcagctggcagcttctgcttgccggcataagcatcatttgccacctggtggtccccgtgctgctgggctctacccagcagctggacccaggatgtaatggagtggcctctcctggagtaaatggccctgcagcagggtggaggaatctcattttgagccccctccctaaaggtggtagcagtgaggccttggcggggtggtgggcaggagctctggtaacctaggctacttgccctggcgcctgctgcccttgaacgagagggagtccacaagtctatatcagggcccgcccctgttctggccaggggacccagggtgggttgatccaaagctactgcccaaggtcctgctcctgttggcccttgggcaccatctgcactggcttccagttcagcctctttgttggttactggagcaagctgaggcccagagaagggcagagagtgccccaagggtcacacaacaggcggtgagtcctccctgccgctgaggaggggctgactcctccagggatcccaggaggccagagggagaggctgcaccgccaaaaacacaaatcccagcaacctcaagcctctgtgccctgggcaggacagggaagccccaattcattaccaagatggaaaatgacacttcccacgctcttcctcaggagaggggttgatttatgattgcaccagggcctgggacattcgtcagcacggcgcagcatgcatgccatctgcgggggcattaatagccatgttattagccaccggtgtgaaagatgccctgcggatgggctatttgctgttatttattataaaagtgcgccagcccgacagcggggccgcgagcgtgcctgagccggagctgggctggctgcttctctcccagtgcccagccctggtccctactgcccctctagtccctaggagggctcgggggtcattcccaggctgaagccaagctagaggggagcagctgctgtcccccaggcctgctgccatgaaaggtctgctcagtggctctgtgcaaagggaggcaagaaacaaacgctctgggcagacagacctgggttggggcctggccctctggttgtgagcatgtgaccttggacaggtctgcccctccctgtatgcctcccctttctgcactggggatgcagcctgtcccctccacacaggctgtggccagctggagagagcattctatgacgtgcccaacactcaggcacccagccctgccagctactcctaatgctaagaggcgtgaccccacaggcatgagtgaccccacaggcgtgagtgaccccacaggcttgaggggctgcagacatgctggtggagaagagcggctcccatgaggccctgctggagttgagacactgttccccagcatcctccctgtgccaaacccctgggaaagggttacagttgggcgccaaggccccaggaggtgggcggggaggctgcccacagctgcgggagggctctgtctccaccctgagcctgtctcttccatgcagggcctcagattttcctcatctgcaaaaagcagacaatcgctgaggtcctttatctcatgattccagggtcctgagtggtgggttccatccgtgagtgtatctgtggggtgggcgggaggggaaaaggccctctgtaggaaagtgaggatcacctctgatagttggagacagacaggcagttgggcagtgccaggccagcatccatatcagtgggggtgaggagggatggccaagagtctccctttggggtcagagaggtcccgctgggcagctgagataggcggtaggagacctgggaaggggagagctccagacatcgagtctgaggcctgggtttgtggccacccctctgccatctgctgcacaatccagacctttccctttgcctctttgggctgctgtggtgagggcaccctgggtcaccatgacgtcctggggtgggctgtaggaaggccagcctccctcttctctaccacccagccctgggtctaggttcaggggcctcccttttggtggccctgttcattcattcatcagatgtttactgagcactttctgtgccaggctccatgccaggcacaaggcagaccatgtcctaactataggagtttacattctaaggggaggagacaatccataaactcatgataaataaatagggagggtcccactgggagaagggcctgcctcctgccttgtcagggttgttctcagcccctgagaggccctgccctcagagcccagtgccaagcctctgatctaggatcagtgagtgttgcccatcaccagcctttactggtcacactgctcctctccaggctctctgctgtggcccaggatcctaaaggcggctgaggagagaagcagtgcagagcccgcagcctcagtcctgttctggaggactgtccccagccctgctggtgctgcctctcttccttttcctcatcccccaaaataaagacctttagcccctctccttccctctgaaattccactgggctttcttttatttattttattttatttttttttgagatagggtcttactctgtcactcgggctggagtgcagtggcacgatctctcggctcactgcaacctccgcctcccaggttcaagtgaatctcctgcctcagcctcccaagtagctgggattacaggcatgcaccaccatgcccagctaatttttgtatttttagtagagacagagtttcgccatgttgaccaggctggttttgaactcctgacctcaggtgatccacctgcctcagcctcccaaagtgctgggattacaatgagccaacttgcccagcccactgggctttctttttcccttccataaaggaattaagtctcagtttaggcagctttactaaaaatggacacagacagacagaaatatcaggtgtaggagcatcttattaaataatgccgagagagaaaggaacaaaattacacgtgtctcctttcatccccccaccccctcctggccttgaatggtttaatatcgaacactgttatcaatataattaacttcctaagacacaattctaaagtcctgtttttttaaaagcgatttacattctctgaagttcaggacatcccgccgcctggcaccagcgccacccagccggcctatgtggttaggtgcatttatagtggatttgcatacctgtctgcaattaccgccagtgataacagctgatgcataatgcatgcagcatgaaattagaaaaataattaactttaggttttaaaagaattcccgccccagcccccatgcatcacaagttctaaatgataccagtggatgggatccaggagcaaagctgttcagggtgatgggtgtggctggctggcaccctgccctggcgggagctggggttagaaggtccttgagggtcatggcatctagtccctgccctaaggagatgcctctggtgggcctgcagtccctggggcatctgcctgaactagggcttggaaaagccccactcacacgactcaaggctcccctcccttcctgcagttcatgtctggggctcagggaagaatggctcattgctagtaatggtaatagttccctcattctgaatacgactctgctaaacattgaaagtaaccttattttatcttcacaaaagcccagggaagtagatcgtttatggtcagatagacttgagacccctgtaatcccagcactttgggaggccgaggcgggcagatcacctgaggtcaggagttagtgaccagcctgaccaacatggagaaatcccgtctctactaaaaatacaaaattagtggggcgtggtggtgcatgcctgtaatcacagctacgcgggaggctgaggcagaagaatcgcctgaacccaggaggcagaggttgcggtgagccaagatcgtaccattgcactccagcctgggcaacaagagcgaaactctgtctcaaaaaaaaaaaaaaaagacttgagacccagggccaccccacagtaggctgagcagcttggttgagccaggcagaccactggctacttgccttcacaggaaaggggcttcctggcgagaaggaggggagctctccctgggtctccctgagcaccaggaagcagcggcctgccctgtctacctcctggccctcttccctctgtcttatttgcagttgagcccccaggaaggtggggtctttcattaatttaaacaaaggtttgctgaagccccatcacagagctggagatgattgtgccttggtagggcttcctgtctagtgggaggtgggactggggtcccactggcctttcccgctctggggctgagaaactgcttctgcccgcagtctgcctgcacggcattctcagtgaggaattgaaggcatggcaaggtttaggggagacacatgaattattgctgaagggagggactggcaggggaaagacacctgcaagggaccccacctgggggctgggaagtgggggaaaagccaaaggaccccagggtctgcagcaaccacacaccagtgccaggccacacaccagtgccaggccacatgggcagccagattcctaaggacagaggcaggcaggtgggcaggaaggaggctgaggggcaagtgggggtgggggagacgtgaccagcatccatgcacgtgagcatgtacttgtctttcctacatacagagtttacatgcaggacacttcctctccccgcctggccctgcctgagatgcccccatcccagggatgggacaggtgaaagaggagacgtgggagtgaggccagacagggatggggggctatttccttgctggcttccagaagctcctgggacatgcctgtgaatagaaaatagcatccccaggttccatgagggccaggagccagcagcagggtccccagcaaaggctgagcagcagacagtgggccataagccaccacgaggggtggggaagaagcttggtgtcactgacttataaaggctttgcagttgggtgtagacacccacactcagcttccctactgctcccccagacctgggaaacccgggaggctgccggcctctccccactcgtgacactgggcagcagctccacaaagggtctaatgcaccgtgagcacagcttctggggagggctgcagagggggtggaaaggggagggacagaagcctcaggacttctcaggggtgggagtgagtgtggcgtggaggaggtagggaactatttctggccactggatgacctggtgacgaaggcccatttaaaaccctcttacctccccggactcctccaccctgcccccagcctggagggcctcccatgggaggctggtgcggccccacaggaggggatggttgatggccccatccaccagctctgtgcggcccagacatagggtcaaggctgccagcatggcttgggggaggggcagggttgcacccacacagtttgaggtgggcagggggcaacacctcagcttcacagaggctgataaggggtcagcctgtccggaaggcacagcaggagcaggggagtagagaacgggccactggagcgcggaggacagagacgggcagctactgcagaagctaggccgtgtgtctggggaggcagagacttggggcagcttttaaactggatgcgtcgggggcatccagatcacactcaggagggggtactctgcacatataatgtcagtgaatcctgaattgtaagttcccatgtaagggcccctattatgaccacatttatagatgaggaaatcaaacctcagagagggcaagcagcttgctcaaaataacacagcctgaggcccggcgtggtggctcacgcgtataatctcagcactttgggatgctgaagtgggcagattgcttgagcctaggagttcaagaccagcctgggcaacatagcaaaaccccatctctgcaaaaaatacaaaaattagctgggtgtggtggtgcagcatgtggtcccagctctgcaggaggctgaggtgggaggatcacctgagcatggggaggtcgaggctgcagtgagccgtgatcgggccactgcattccagactgggtgacagagcgagactgtctcagaaaaaaaaaaaaaagaaagaaatcataccacctgaaagtggcagaggcaggatttgaacccaggcctctctgtcctggaggttggcaggggacaacgactgatagagccaagaataatgccaagaataatgccccagggcccccagctaagcggaggagtaatggacacctacagcctgagccatcccactgctcccttcgcccacccccgtggcccgctaaggatccggctgtcagtcatggagctggcaggtcgtaactcacaccacgctgaagtctgagggatccacgcaagggcgacaagcgatcccataaaagatgggcgatttaccaggtttaatttgatggccacataaactatgaaacacacaacaagggaataaaaaggcaagcaggcacccaggcaattagagattcctctggtgaggcgtgctatcttcctccccacccccaggtcccgccctactttcctggagccagagggctcagcctcgggctggccttggggaggggggcggcaggggagcctttggccaagatggatgaggcccacagacagtggagcggaaaggccttgggtccctgcctcccaaatgcttcttggttatccatcaagcatctctgaaaggtgcaatttagactctattatgatgctgaggcctctgaaggctgaggactgtggccatgagctgagcgggcgctgggaacagatgtccataccagggaatgcggtggcttgccttggctttggccttaacaagtttgccccctacttagggcactgctcagaacagctgagtacaaaggccacctgtatcccttgtgccagaactcagcagccaacagaccaggttgggggtaatcctccagccagacgctgggggccccctggcagaggtgctcctagactcagacttgaccctggagactgaggcaaagtgacctgtgagctggcctgtgtcttcctgtctctagcattgccctgtgctacctacctgctcataagtggcttgaggcaggacctccggctccataaccttcacgagcctggctcagtgcagaagggacagacgtgcagtgggaaatctgggctggctgtgaccttggctgggcccctcatgtctctgagtctcaggctgctgggctgtgaaatgagggctgtggacctgtgtgtaggcggcaacctctgcacccttgcctgtgaaggggggtgggtgaggtctggccagagaggtcaccccaccacctaggcttttcctgatcctctgaaggctgatgtgtctagctctgcatgctgtcctggcttcaagcccgtcctttcccatgatctgggccagtgtccttcccagtccccaatgtaatgaaaggtgaggtggtcagataagggtcagagcagcctgggatggccctgggcaaaggaagcaggaggctcacaggagagtgggcatctccatgaaggtctgagaatgctcagcctgggctgcaggactgtgtctgggctggccagggactcacagccctcagcagtgtggagtcaagcactgaggtcctgcagccacgcagccctggggtggaatccagaccccacctccttctgccaggggaccatggacaggtctctgtgcctctgttctctcatctacagaacgagtccatcacagtttctcctttgaaatctttagtgagcatctgccacgtgggaaacactatgaataagatgcacaaatccctgcccttgtagagcgtaccttctagtggggagacagacaataaaaacaaaaaagggccaggcactgtggctcacctgtaatcccagtactttgagaggcccagggaggtggatcacgaggtcaagagatcaagaccatcctggccaacatggtgagacccccgtctctactaaaaatacaaaaaattagctgggcatggtggtgcacacctgtagtcccagctactcaggaggctgaagcaggaggatctcttgaacctgggaggcggaggttgtagtgacccaagatcgctccactgcactcccacctggtgacagggcaagactccatctcaaaaagcaaaacaaggcaaaacaaaacaaaaaagataaaacacgtagtgtgttagttggtggtaaatactataggcaagcaaggaactgagaggagtatctgggagttataattctcgatagggtgcccaggaaaggcctcactggaaggagatgcaggcgtggatctggggatgagctgtccaggcagagagcacagcacttgcaagggccctggggatactagggggtgcctggctgctgcagtcagtgagaggggaatggggtggaccaggccaacaggggtgccacataggattgcacagggccttagcagccaccttgatgactgtggtggctgcctgggcagagaccctgtaagtgtgaagggaacgtttgagtgtgcaggggtgagtggcagagacattcaccacggcagggcccattctgtcatcgggtggtcactgatgcaaagccatgcttggccacagtccctgccctggcagtttggtgacatgaaaacaccagtcaccaaatggtgtgacctgcaacccacagagtgctgcaagcctcaagattgccaagattctggcctcctccctagatggcctgggttcctcctacctggttctcaagtagtcttgagtaagctaacatctctgagcttcaattttctcatctgttaaatgggattaagggcactgacctcatgtttgttgggagggttaaatgacttaaatattaggaaagttctcagcaaagcctttattatagtgtgaactatcatccatcccatcagaatggaatcccaagtggctacaacagggcctggaatatagtagatgctcaataaagctctgttggatgcatgatggatggatggatggatggatggacaggtgcatgtgtgaatggacaggttgatgcatggatggatggatggatggatggatggatggacaggtggatgcatggattgatgcatatatggatggatggatggatggttggatggatggataattggatggatggatagacaggtggatgcatggatggatggatggatggacaggtggatgcatggatagcatggatggatggatggttaggtggatggatggatggatggatggatggatggatggatggatggatgggcagacaggtggatgcatggatggatggatggatggttaggtggatggatggacggacaggtggatgcatggattgatacatggatgatggatggatggatggacggacaggtaaatgcatgatggatggatggacaggtgcatgcatgatggatgaatgaacaggtggacgcatggatggatggatggatggatggacagctggatgtatggattgatacatggatggatggatggatggatggatggatggatggatggacaggtggatgcatggattgatgcacggatggatggatggatggatggatggataattggatggatggataattggatggatgaatggacaggtggatgcatggatggatggatggatggacaggtggatgcatgggttgatgcatggatggatggatggatggatggatggatggatggatggacaggtggatgcatggatggatgcaaggactggtgcatgcctgaatggatgaatgaacaagtggatggatgcatggatgcctggatggatggatggttagatggatggatggatggatggatgaatggacagatggatgcatggatgaatggatggttaggtggatggatggatggatggatggatggacaggtggatgcatggattgatacatggatgacggatggatggacggacagtagatacatgatggatggatggatggacaggtgcatgtatgaatggatggatgggtgaatggacaggtggatgcatggatggatggagggatggttgaatggatggatggatggatgaatggatggatagatggatggatggagggatggttgaatggatggatggatggatgaatggatggatggatggacaggtggatgtatggattgatgcatggatggatggatggatggatggacaggtagatgcatgatggaaggatggtggacagatggatggatggatggacaggtgcatgcatgaatggatggatggatgaatggacaggtggatagatggatggatggacaggtagatgcatggactgatacatagatggatggatggatgaatggatggatggatggacaggtccatgcatgaattgatggatggatgaatgtacaggtggatggatggtaggtgggtggacagatggatgggcagagcagagggaagctttatctggggcctcaggaaaacctagcagaggaggtaacatttgagctgggtcctgcaagagtagcttgctcgatggaaagaaaaagcagctcaggaatagagaaggacagagaagacagaaagtttggcctggttgagtaacagagatgttcagtccctggggcatgaaaataaggtccctgctggctcagtgagcaggtgccggctctgctctgcacaccagggctgccctcccaggctgggacttcaggttccgagaggccatcatgtcccatcattgaaaagcctccgtgaacccagtgttttacagcagacttttgctggctgcatgaagacaccttcctcactgagactgaaagataatttctctttaattgattttttaccactatgaacagtaaaataatataagaaaaatctatgctgctatttttccatttgtgaaatccaaaattacaccttgcagccaattccctcagagtacagacgtgactcctccctccttttatttgtctcattcctttaagtgcaagaaaacagaccactttttttttttttgaatagctgaaagtttatgatttgagaaaggggcaaggtgtgggacaatttcccacacaactcggaacccagggccagggaggcacctctgatgaaaagagatttctgtaaatacatgagaaagtgattctgttgacacctcattcttctgtctgtagaatgtacgagtgacaacaggacatgttgttttaacaccagacaatgaagctccctgctctccactcctcgccagtgatggcactgacagcttcgttcccgcaggttctggcgacgccccccttttgagctcctgggccttccagcaacaagctttcctttcgaatcctgggtccgagccagacagcaatgcgtgctcctcgtgcagtgccagggaaacagcagctatgaatccataaaacacgccctaaatccatcccatccatattgactggtacctttagcgttggccataaagtggctttgtgtgaagtcttgagagaagaaaccaagcctgctgcatggctctcactaaattaacctccctgaggctccggatcacattccaggagggccgcggcagcacgggtctcattaatgcgcagcctcttggctcctgataagatttaacattagccagatgttgttagagtccgacctcggcgggagcaatcacctgcggcataaacctggcacaaaggccactcctccagcttgacctcaccccgcaggaccggacttcggtcaccccttggtacaggctggcaggtgggagggaatgcacgattcactcctggggtcgctgtcgccgcctccctctcactgcccctgtcctgtgctccttgcaggtattcaggctccaggccaggtggggccggacgcccccagccatccaccatggtggtggcacaccccaccgccactgccaccaccacgcccactgccactgtcacggccaccgttgtgatgaccacggccaccatggacctgcgggactggctgttcctctgctacgggctcatcgccttcctgacggaggtcatcgacagcaccacctgcccctcggtgtgccgctgcgacaacggcttcatctactgcaacgaccggggactcacatccatccccgcagatatccctgatgatgccaccaccctctacctgcagaacaaccagatcaacaacgccggcatcccccaggacctcaagaccaaggtcaacgtgcaggtcatctacctatacgagaatgacctggatgagttccccatcaacctgccccgctccctccgggagctgcacctgcaggacaacaatgtgcgcaccattgccagggactcgctggcccgcatcccgctgctggagaagctgcacctggatgacaactccgtgtccaccgtcagcattgaggaggacgccttcgccgacagcaaacagctcaagctgctcttcctgagccggaaccacctgagcagcatcccctcggggctgccgcacacgctggaggagctgcggctggatgacaaccgcatctccaccatcccgctgcatgccttcaagggcctcaacagcctgcggcgcctggtgctggacggtaacctgctggccaaccagcgcatcgccgacgacaccttcagccgcctacagaacctcacagagctctcgctggtgcgcaattcgctggccgcgccacccctcaacctgcccagcgcccacctgcagaagctctacctgcaggacaatgccatcagccacatcccctacaacacgctggccaagatgcgtgagctggagcggctggacctgtccaacaacaacctgaccacgctgccccgcggcctgttcgacgacctggggaacctggcccagctgctgctcaggaacaacccttggttttgtggctgcaacctcatgtggctgcgggactgggtgaaggcacgggcggccgtggtcaacgtgcggggcctcatgtgccagggccctgagaaggtccggggcatggccatcaaggacattaccagcgagatggacgagtgttttgagacggggccgcagggcggcgtggccaatgcggctgccaagaccacggccagcaaccacgcctctgccaccacgccccagggttccctgtttaccctcaaggccaaaaggccagggctgcgcctccccgactccaacattgactaccccatggccacgggtgatggcgccaagaccctggccatccacgtgaaggccctgacggcagactccatccgcatcacgtggaaggccacgctccccgcctcctctttccggctcagttggctgcgcctgggccacagcccagccgtgggctccatcacggagaccttggtgcagggggacaagacagagtacctgctgacagccctggagcccaagtccacctacatcatctgcatggtcaccatggagaccagcaatgcctacgtagctgatgagacacccgtgtgtgccaaggcagagacagccgacagctatggccctaccaccacactcaaccaggagcagaacgctggccccatggcgagcctgcccctggcgggcatcatcggcggggcagtggctctggtcttcctcttcctggtcctgggggccatctgctggtacgtgcaccaggctggcgagctgctgacccgggagagggcctacaaccggggcagcaggaaaaaggatgactatatggagtcagggaccaagaaggataactccatcctggaaatccgcggccctgggctgcagatgctgcccatcaacccgtaccgcgccaaagaagagtacgtggtccacactatcttcccctccaacggcagcagcctctgcaaggccacacacaccattggctacggcaccacgcggggctaccgggacggcggcatccccgacatagactactcctacacatgatgcccgcccacccgggctgccccgcctcagccccagctgccctggcgtggccatgtggctttgcccagcctgctgcaatccaagagagcaaggaagagaaattccatgggtgactttcctccgcagaaagcaaagtttggggagggctgacgattttgtagaacacaacagtgacaattttttttaaaagaatagaaggcaggagggggaattcgacattgttgaagacataatttataccaagttatgccagttggggagggaaggactaaaaataatattgcaggcagggctgggttgggttttttttttttcccccctgaactggaaggatactacctgtacaacatctgtggacacctcatgctctgttcaaggccatcacaaaggaaccgccagggagaagcagccggctctcaaagctcccacgcagctctcccgccactggccactcgctggcgacccgatggaaggttttcaggctcctcacaaaggagagagggaagaaaagatcttttgccctggagatatggtcctgaaatctctcccctggcttattccataccatttcccttgcagatttgcagaaacatggcatctttcactgcattctttgaacaatcatgtagtcgattaaaaaaaaaaaacaaacttttttttcctaggctgaagccctcttcagttccatgcaccacgctccgtagaagccccggcggaagccgtagctttccctgccacctggaggtgcatctgtctgcctgtctatccctgtcgcggtgtctctaagtacagatgggtagatagagccacatgcacggtccttaccgttcttcttgggtcagttcttaccatttcctgaacaatagaattgtgaaagtgttgctttctcctagaaatccttgagtaagtagaccgtgtgttggggatgggagtgaggtgggggaggagacttggtctccaggggctgctgctgttcctaaaggctgaggtgtgtatgtctcagacgggtggcttagggaggcgtcgcagctggggctgccagtcccatcctggctcagcttggccagcactgggctgctctcctttctgatacagataaaagctttatttgattccagtgtcctcgtctccctcccccaccacgtgcaatcaccttaacagctactttctgagcatttaccatgtgctgaatgttccctcctaggacgggtaattagcgcagggattttttttttaaatatcagctgattagacctattggtttccatggctgctcaaacaaagcccagaaaaagacacaaaaattctcgaaaaagccctgggtgatggcagtccctccctgaatgtagaaaactcagctgggcccacccctgggactctgtttcttgagagggagagaccagatctctttctaaaaatgccagcctccgaaagggccctgactgggaccctcagaagagttaagattttatttcctccctctggaatccatgtcgctatcatgcatttatcaactgacagtgcagtgtggtgagccatgagattaaaacgatgatgaaataatgacagcgaattggagagggaggaagagcggagcctggggttccgacgtgcctgcgtcccagtactcagggagcccgggtcaccatctgtcactgtgccgcttgttctgcgccaaggaaaaggaacgtcaaagaggagatgctggtccgagggcaggaggatgagagggctgggagcgcctggtggtgctattttcaaacggcctccaccaccgtgcgaaaagcaaaggcagaagcagcagcggggcaggggttacgttaaaaggcccgaccgccaccttcagtgaggagatggggctgaaaggagcggacacaacagccacgtggaaagtggaaaaatgggcacaggctcccagcacggcctgggggggctagcccacgaaataggtccactccccagccctggggaacagccgagcagcgtggtcacgtttcactcgaaactagacgtgtttttccttttcctgcctgaatcattttctcacacaataaggtcaagagagaaatttccccaggccttaatgtcaggtctgtataaaaggcagccccaggccgggtgcagtggctcacgcctgtaatcccagcactttgggagactgaggcaggcagattttctgaggtcaggagtttgagaccagcctggccaacatggtgaaagtccgtctctctaaaaatgcaaaaattagccaggcatggtggcaggcgcctgttacctggctactcgggaggctgaggcaggagaatcgcttgaaccagggaggcagaggctgcagtgaaccgagattgcgccactgcattccagcctgggcaaagagtgagactccatctcaaaaaaaaaaaagtaggccctcccagtggaccatggccccccagccccgagatgagcagaagggcccacctgggatgtctgggaggagagcgtgcccgaggtgtgccacgttggcacaggggacagaagtcccaggtctctgctgattctaaaatgagaccacccctccctgaagggcaccactctgatcactgccttcccccaagtcccgcccatctgcaacacggtgctgccagcacactgtccccacctcacctaggtccccctgtctcctctccccaccctagacaggtcaggtcatgcccttagtggctaggaaggcatctggggacagcaggtggcccggaccgtgagagctgcctgggaaggtcctgcttggctggggcaggagtgcgggagacttagtgctagagagcaggcagagctgggagccagcctgtgcccagccacgccctccgagacaaggcctgagtgatgagctttcctcccctcccattgcacagagcaggcccaggcaggcaggagccctggcagctgccccagaggagctccttgggccccaggaccacgcgagtctcctgttcctggttcttgcactaactgggcgagggcggggctcggcccctcttaccagaccctgcctgcctcatcgtggggatcacccacccactggcgctctaagtgtggaggaaggtagatgctccacccagtcagggccctgggacccagctctagagctgactttctcatcttttctgccccttagctatcctgacaccttcccagggtcctttctgggctttcccagaggaagcccccaaatatctgctgtgtcacagcccctcagccagggaggggccagaagctaggtccgttctgaaaccccatcccctcttggcccagctcctcccagctggtctcataccacaagataggagatgtttcaggacacccagcctcccctacacctcagacatgcgtgaggacacaaggcctgggatgccaaccccagcctgtctaaattctcccgggctcccgtgcacagctgacatttccaagggaacgtccgcggctgggctgaccctcacagcctctaagtagccagaataacctcagcggccccagcactgatgagtacgttttgtggcatttaaggcaggtttaaagttaaagataaaaaaagcccatgacgcttctttggttaagtggtttacccttcgtggtaattagatgtagtgattggaatctcttttctattacatggcaattttcctttaaatctcccctaaaaaaaaaaaaggaaaggaaagaaaaggcaaggaaggagagagagaaggcaccagcaggccgggaatcatttgcattttgcgaatgaggcctcttgtaagctcagctcaggcgtggggcccaatgtatggaatgcttaagagattactaaaaataaaatctattaattagtcatactcaattccacagacatgatgtgcatcaaaagctccttttcttcccttttctccttccccctccccacggcctcccgccacagcctccatcttctctaaataggctggggcttgctccacgctaacatggtgcatgcggcggccaggggcctccctgacacagggccaggatgcaggtccggagccaagagcaggggcattgcaccttcctggctctgggtgacgctggcaggggaggggacagcacctgggaagatggcagcagctaggaggggcccaacctgactctcccaaagcccaaagcccacacctgccgtgtgcctcttctccctccctctacacaggcaccgggtctcctccttcccctggggatctgggaaaccctccctctgagcccagcccagccctgtccgaacaaagccaggcagagagctgaggagggggtcggggagatgtttccagagcggtgcagggaaagagggtttggtgagaatacagcctctgtttccccttctgtaaagtgggggtgtgctagggaggggtccagcgtcactcaggaaactggtgctccagaggccaagtgggggcccttccccgctgctggtgctgaaaggttctagctggcccaagtcaggtgagggatccctgaagggttggaggggctggtcagggcctgagcagaggacaggctgggacccaaggctgcctcggaacctgtgcctccctccttcacctccggccctggagccaaggagccaggagaggaggagaaagagcagaccctcccccttgaaaatggcagctcaagtcccaaagccagcccacttcagaaacctgcttcctgctgaacgtgccagagaggaggctggggcttctgagccttgcacttatgaaaaatacaacaaggagaactggatgcagcaaagagggagcaaaggggcggggagggcaacggggagagcaggggcagtgctggcaggaggggccgggcgcagggacctgtgcccccaagggccagaccctgctctcagggccaggacgcagccagggtcagtgacgggcgtccgcgtgcctcctcatactcgattggcacaggtgacggtggctgctgcctgcccctggatgggcgccagggcaagcactcacaggcgattcgcagccgtgcattggccttccgagtgcagagaggaggcatttttttttcttaaggagggataaaaaggctcaaaaatgcaaatcgttaccgtttacaaccaagcaagtctgctaaattgattaggagagattaaactccttggaggtgcagggaaagggggatttttcgtggtttatgaacctgccccaagtggctatctgcatagcagggactttctgggcctcgatgggtggggtgggggggttgggggtgcaagatgggggcacctgccctggcttggctccctggggagccagggtctctgaagacaacaccaaatggaccagagcactcaggcttgaggctccagcactgccctagggaaagggactcaggcctctgggacaagtggcccatccagtccttagaaagtaggactctagagccgtgggcttttctgcttcctttctgttctgggtgggtctgtctccaatccactccttgtggccagtaaaaggggagtgggtaaagggaaaactgaaggtcagggaagagaaactctagcccagcaaaggaaacaggcagtgagctctccgtcactgggagcattcaagcactagatggggacgtggcagatattttcctcccaaggtctggtgctttgactagaagatcctggttcccacccttgctttctcatcccccaggacactgaaagggagcagatatcaagagaagttcaccatgttgtttaaagtcactggtgtcccctgaaaaccccaagtcagggcagtcctgaagccagaccatcctgccccaccaaagagccacttgtgccagcagagaggctgcaaaatacccatcctcagtgtccaagaggcaccaagaaagtacagatacatgccaccccctttccagagtctaaactcagcacctatggctcgccagaggggctgacagagagcgcctcccaggccctgcagctccgaagcccaggctgcgtcctggacctgtctcttaagccagggctgccccacgtgcagtccaacacgctcatgctgctgctgctgccactgtatctatccatccatccatcaccgccggtggatggcgcctggggcacttttcactctgtggttttaagcatttactgtttcttttgaaatgttccaagtaggtgcctgaaatacccatatttgcttctttttaaaaaactcacagaaagattctttttgctctccatcccctccctttgctcttccccctccctcggcatttttaatctgtgggttttccctggttttggaaattccaaaagtgggggtcaggccccctttctcaccataacagatttgcgggtgtgcctggagacccccaaagccacagagcaaagcctggtctttttctttttttttttagacagagttttgctcttgttgcccaggctggagtgcaatggtgcaatctcggctcaccgcaacccctgcctcccgggttcaagtgattctcctgcctcagcctcctgagtagctgggattacaggcgtgtgccaccatgcctggctaattttgcattttaagtagagacagggtttctccatgttgctcagactggtattgaactcccagcctcaggtgatccgcccaccttggcctcccaaagtgctgggattacaggcatgagccaccgtgcccggccaaagcctcgtcttttctccacgtctcccccggagacccctgcctgggacagctcctgcttctggtacctgctggagaccctggccagggcctggctctttgagaccactgtcactgtcccctcccgccccttgtcactgaaatgcccggcctgtgccaggagagagtgagggtgtgctgagggcatagggcaacctgtgggtgggatgactgcccccacgtcctaacaaagccagcccccaaagcactgtggccatctgagtgggcacagtgccctggcccccctgcctccccacacctgaaagcccaaagcctaagaccagagagtcctcaaaggaaggtctttgctgccacagccctaaatctcatcaaggtagatagtcagagtcagcaccttgcccttcccagggtcactggggcccagcacagtgcctggcacacaggggtactcaatcctttctctgccaccaacggaacgaggccgcctcctcctctcacttcctccccagttgccatctgcccactcattgaggatggcccaggcacgagtgttggcaacaaacaggcttctctcgtcctgctcctgccccgccagcagctggcacagagaggggctcatctcagcagctttacctcttggaagcacctcgctccaccctgccttggatccacgtgttgccagctgtgagccagatggagaaatgtagccactctgagagatccggtggctgccccaacctgtgtcagtaactcagtttcccttctccaagacttgccttgagtggatgacaagggggagagaactgggggagggccccacagaggcgctgcaagaaatccagatcccaggcgacacctgctgccttgcctgctgcccccgcagaatccctgcatctggagccacccacctggaggaactcatcgggcttcctctgtagacgggaaaaaacaaacgcaccacaaaccgacaatcaaagccatggcggatgcggggccgccaccagttcatctccctggagccaggcggctccaggcctctctcacctttcttgtgtggaacgcaggcttgcaatgttctgagcccacctgtcctcgggctagtcccattttcaaaagttctgagtacgcaggtgagaagacacccccacaaaaccccaaaactagccttaggctgtttttccccaacacaacgcacctccacaccccacaccgccagcagcccacctgggtacccaaagtgagccgccagggggttccgaggaccctgcctggtgccttccagctcataaggagaggccaagagccatggggaggaagccacacggcccagcgctcagggcttgtcatccaagagtgagagaagtggggagagaggtgacggagggtggagtggtgtgtggcgtcgaaataggctagccagagagagaggtgcttgtgggattctgctggctggagccaggaggtaagtgtgaacagggaggccaaagatgaaagttatctgaaagagcccgtaccccctataaacacggcagaggaatgtcttaagagccaccaacagtaattccctttccggatgttaacaggttatttgtatcttatgtggtgtcgtaaagcattctggagtggcacacaacgtcatccccttcccggtggtctgaagaggaggaggagaccagggaggggtccttggccagcccctggcggccaaggggtgggtccttctgctctatagaaggcaggaagcccgccagctaaccgcccgggtcagagggagcaggcctgatctctcccaagcctgtgaccgaggtcctgcctgatgtccaaggggcccctgtgccagtacccccacttcccacgccccccagccttcctcacctccagaatcagccgcccaggtgcagcactatctcctttctttttcttggaagccgtctcaggggcctgagtgacgggcctgaccgtccccgctaccgcctgctgccatgcgaccagatggctgacccggcccggcttctcagggcccagaccagcctggcctcgtgcccacctgcttcgctcccaacctcaccaccaggcaagggtttccagaaaaccgagacacgcaaacacccaccaccacgacaacaacacaaaccaaagtgcactgcgaaccgccctttggcctccttcttgtaggtgccttgaaacttcaatgttgagatgaatgtgattaactacttggtcctattttctgtttgtctattttcatagaaaatgtccaagtccacttgccttgttctttcttgaaataaatagaaagatttaacttttacggtcatctcttgctgctgactctcggcttggcaccccatcgggccaggggccaggtgtccggggcacacgtggtctcagcggcccaccccctccccgggccttgcccccgaggctcagcccaccccctccccggaccttgcccccgaggctcagcccacccctccccgggccttgcccccgagggtcagctctgttcttggggtgccctggctcggaggcggtgacccggcaggatggagactgttccctccggcaccatcccaaccaaaatgattccgctgcaggaagaagggccctctgtccccacccacaggccccagaggtctactgacacctgagtcaccacaaggggacccagagctgaaccagagctgaacgtagactccgaggggtctctacatggagaagtatgtgtcagcaggagctatgggttatcctggaagaggctccagcaaccaagtggctccggggtaaaagtgggactgtccgggtgtttggggacatgagcttatgccaccaccccagacgccccccatcccctagatgtacccattacactcacagctctggagcctcatctgcctctctcacatcccaaagggagggggacaggaaggaacaaaatttccatgagaacaatagcagtctctgctaaatttaacataaaacaagaactcattacttctgcctgagatctgatttcatgtctggatacagttaacgggtttttccttatattccaaagaagcaaagttaattctcagtggccggtggccctgagtggggtgacgtgggccccacaggtgctctctgccccaccctcctcctccatcctcacctcctgtcctgccagggcaggagcagcccaagagagaccactctaaggtgtggcacacagtgtgaccacccaggaaaggacccaggctgttcttccaacttctccctgagacccagcgcacagtgggtgcccaggaggggtgcccactccctcacctgagacccattctctggggctgtcgagggctctttctggaacacagtcagccagccagccagccaggagatattgactgagggcctgctatgctctggggctggtgtattcctgcctcatggaggagtgaggaatctacgtggctgagtcagggcctagcctgggtggggctggggaggctctgtggggaaccagatttccacagaggacgcttccacggataaggaggactaggaggcaatggggaaggcctggcacgccgcccgcctgaggtagacaggagggcaggtccacttctgcgccccactcaggaaggccctgtgtccccccatctccccgttgcccccctcagactccagcctcagtgcagccccaccctctgccctccacgcctgacaccccccaggcccagtgtggcttagacttcaggtctatgctgcactggtttcccacgcctctgctggcctttctcacctgcacaggtgaccccttcccacgcctcgcttggctgagcccagactggcagctcttgccctccacacctccagatccccagagggcacttgtctggcaccaggaggccccgtaaacaggaatgaagagtgagtcgataaacagtaaatcaatcagccaatcactccatggatccatgtgagtacaaggaggatgattctccaagcacaacagcccttgccaaccccagtgaacccacccttccccaggaagtcctgctcccggctttacctcaccctccccacgtgtggcagcgccacaaatctggggacacctgtggagccctcgaagctagggaagaagggctgtgttctcaaactgtgttcctcagcccctggagctaacacaggtgttgcccagaaagggttcccggtcacaggcctttgggaaccactggattaacaccactgctctcctggggcagggccttggagtccctgggtattgggttagacccatgggctccgccagttaccacatgtgctactcatcctctctgtgcctcagtttccacctccatgcgtacatgataacagctccatccccgactgctgttgggagggtgaggtgggacgacacaggtaatgccactgggagtgcccagctcagaaaccacccgcaccaaccctacggctgtgacggagcctctgtgagagggcgtgggaggccgggttgcctacagtttgtctggggagtgtaggcctcccccacccccagcacagcctcctggggggtttctcccgcattcctggcccccagggatggagccaggtgctgagctggttggcacttcttgcagggaggcccaggttcttggcaggacctttggacccaggcagcaaagtgcccccaggtccagcacagagaggcaaccgtacagggtggggcctgttccccaaaccacccccacaacaatcccaggtccacggcctgctgaagaggatgacaggctggctgcagccttaggcttcaggattgggggtgggtgtgggggacatctcaggttttaatacgcgccccaggggagttggaggctcagccaggtttgggccgcacaggagggaattgccaggacctgcatttcaggaatgaaaggaaaaccctccaaacataacctgttctgaagaggaccgggtggttggggggccgtgagcctcccgttcttacaggaaagcaagcaggactggccagtgcctcaaaggcactgcaggggacctgctggccccaaagagccctgacaccatgtcttcagctggatgccaggagatggggtggtcccccgagaaacctaccccacaccactgctgcagccccccaccgtgccaccctccagccaagccactttgggccctttccttccccacaaatctctcaggacttgcattatcactgagattaggggcacgtgtgggtaagacccccgaatggctgccctgcggccaagaggcaccttaagtcccggggctccggctttgtgtatctgactccgtctgttttgtcagactcaggactaaaaagctcctgctcaaatgagagagagagagtgggtgatacctacccctccatggctgctttcctgtacctggaaactgcccttacctggctaccactgggttctggaagcttcccttctcctgcccctacttcccaggaggggtctctggcctcaccgagcaacctgaagaagaggcgtcggaacctgggaggggtctaacaccccaggccacacccccacacccaagttctgtggctgagtcttatcacccagcctaggagggtcccggacgcatgggagggcacccagctggccctgaaattctgcctccgtgggtctgacattggctcatccactttcaggcaccccaaataaggcatgcttccaggacccccccacacatgccgctgcctccccgccgccgcacccacgtcaccttccagtgctgacactgccacctccccacccgccaccctgtccagcacctccagaggaccttctcctcctgcggcaaagtaaacaggctctctggagtgctaactgacagcacaaatgaaatcctgcactccctccctctaagatttacaggggaagtgaaatcttatttgcaatgctgccaagcctgggacgagatgaaattatgcctcaagaagagaactggccggcccggcgaggaagcactgcatcggagatgggcttattaaaaccacagtggccacatttcaacctgtttcaggtgttaagtaatttactgccacccagaattcagtggcaggtttttatcatttttattcttgtgatgcaggcgagtgccccaggaggtccctgtgcagggagctgcgggtctaaatgctccctgtcacccccgccccaggcactgcagagggaaatgggggccagctgcctgaagcgggtgaggacaccctgactctctccagggttacacccagcttggccatagctcagagtgacggggagggcaggctttaagaccctcaccccacccacgtgtgggggctccatgatccctcaaagaccctcgggacgttttcttttttttgatggagtctcgctctgtcacccaggctggtgtacagtgaggtgatctcggcagcttccgcctcccaggttcaagcgattctcctgcctcagcctcccaagtagctgcgtgtacaggcgtgtgctaccacgcccagctaatttttgtatttttactagagatggggtttctccatgttggccaggctggtcttgaactcccaacttcaatgatccacccgcatcggcctcccaaagtgctgggattacaggagtgagccaccgcgcccagcccctcaggatgttttctgaaggcagcaggaatgtaagctctctgggagcagagactaccctgtttcaggctgtgactaccaaccaagcctttattgagcacctactgcatgccaggccctgttcagatggggaacatgcagcaaatgggaccgagagccccctgccctgtggagctcacgtgctgcctgccggtaagtgttgagtaaatatttgtggttggttgatgaaaatctcctacaggcaaacaggcccttgaaagaaaagaagctgaggaggggggcagggggaaccggagggaagtgagtggcgggagggaggggcgcacttgactgagcatctgctacatgccagtcatcacagtgactgctggcagccctggaagtggggcctccccatgccggagctgctggggccaggtctctgcaccttcccctgctctggagaactatgcagaaatggctgatactccgtctgaactcatgaggaacacagtctcctattcatggggagctggggacaaggggacctacagtctgggatgtggttaggaacagccccacgtcctccaagctctcgagccctttctcagtggtcccgggaggagagctgtttgatgcctgctggctttggggggattaagcctattatggaggctcccggggcttatctgatgcctttctccacctgttttcagatattccaggaagaccaaggggaatcttctatgtccaggctgagccaagagcagaaattctttaattagctttctcctggatcagggccctggcggatggattggtcactgggggtggggcggggggaggggaaagggattgaagtcctctttaaagcagagattacaaacccagggtgaagggcttcagggcagttgccagggacgggcgggtcctgagcaggccctccccagtcagcggctcctcggggtctggcagatggaatctgccaccaggaagatgcagggatgtgctctattgagcccgcggtcctcaggaagctggcacagagagatgcttggcacagtccaggctgtgtgcccgggtctcctaatgaatgtggctcttccccatgtgaccatccagatctgtaacttcataattaggggggatttcctgaaggggcgcccatctgcgagaggcaaggcagcgggggccagtggtgccaggcgccaggcatctgtcaccgagcttcatcctcacggcagggaggtgcggcaggctggcttactcccattttaaaaccagcaaaccaaggcccagatctaagcagcttgcccaaggcaatggtgacggagttagctctggaaccaggtctgtccgggttccccccactgccccgagtcctggccccatgaggcctcatgaagagaccaggctgagggtcagtgagctggagggaaatgcacacccatgagccccagccagagcgccctgtggggaactagacctccccaggaagacctcccacaggaagccgtccctgagcagcccccagcgccttggattcctgcacagatgcacggagcccccacgctatgcccctgctgccccgctacacagggagcaaggactgggtcttaatcacttcgtgccctttgaatgcagaaaggaaggttgcgtccacctcagcttgggaaactggaaagaagactggcaggaagccaggggcacaggataggccaggctatgcctcaaaagatgggggacagggacagagggagccaagagaggagactgctggggatcccaggctggagctctcctgctggctgccttgcatagggaggcacacgcaatgtgagagggcaggaggccgagccagatgcccggggctgcggccgtgtgaagtgtggctcgcgttctctcccttgatctcctcctaaaaggcagctcccctgtgctccggaagcactggacacaggtagagcaggcagagaaagacatctggacccagaccccatgggcatggccctgccacccgccccagcctcccttcccagtgcagcaagctgagccattcccagagcagactgccccagggcccctgtccccagtccctgactctcagacaggttttcccctgggatccggtcatgacgggtgacttgtaggaccctagggcaccccagctgcccgggtacatctcccttgttcccccttgcagccccagcacctgctgcaggaattaatgaaacgaatgaatgactgttacagactacatgggagcgacagcaaacccaggtctggggaagttcctggaggggagggtttctcagctgggacctggaggacggtcggagtcagccaaggaaatggaggagagggtgctcctgacagaggtaagtgcccaggcaaaggccaggagcagagacagaacatgcagctataaagcccaaagtcacccaacccggctagaatggatagggtaggagagggaatgaatgaatgagaaaaggcaggagaagttctggggctagatgacagaggtggccatcagggcaagaaggctgaggtcaccactagagcttcccacagtggaggattccaggggattccaaagaagccaagataacagccagggccgcccagctctggaggtccccatgtccatcacagtcattccaccccaccctgagctttgcagtacacccctggcaccagtcatgaggttgcagagagagttgaaaccctgaagcaggaagcagcattcccccagtgagaggccaggcccagagaaaccccagcctctgccaaggaagcgtgaggaccccaagggcaagggagctggtgggggtaggggtgagactggaagttgaacccacagggaggagggaaagcaaaggatacaaaggcagtggcggcagcagccccgctgagacttgctgtgagcagagaggagccctgtttacctggcatgaagcaagtatttccaggcacctactacatgcgggtttggtgtgagatgcaggggtgggggacagcacctgaggaagcacctgcctccccggctgcgccacacctgtacacagcaatacttccagcacccgcctctctagtgggtgaagaatgatgtctctcatttcaattagctttttcttgattacttgcgaagttctgcatcttttcacttgtttactggccatttgtttttctcctaccgggaattgcctgtccacatctttcacccatttttcttattgatttgtaggagctcttcgcatattaagagaggagtagagaagcagccttctcctagggcagggccctcagagtctccctccagggtcctcggtcccagggaaggcagagagatttgtgtgggttgctgggtgctcccgctgaatctctgccccctgcctggctcccgatcagccaactctgccagaagatgaggcatctcctgcaggtgagggcccctgccaggcctgcatcctgactggtaaaacccagagggcttatttttcacttacactgagaagtctacactgccagtggctggcaaggtgccccagatggcacctgaggggagccagctggcatacccgggcatcgcagaggacagaatgactctcgccatcccaggtcagtctagcagggaccatatgacaaatggaacaggtcctgaagcctcaggccggccctcccactagaattccaggccccctcccggtcctggcacacaccttccctgtccccctttccaactacaacggtccctaaagagcaaccccggccagggccgctcagctctggaggtcaccatgtccatcacagtcactccaccctccaccccaccctcagctttgcaggagacacctgagcccttgccgcttgccctcggccacctgacctttcagggccagaaccatccctgcattttattttccctccagagcattccacatttcagtggacaaacacgcaggccataaaactgatttccaaagcctataaaggcaataacatttagggaggaggaaaaataaagcccctcctttcccagagtaacggctgccaggagtcctcgaggggccccttctgcagcttgaggggagcagcgcagggccagcttgcagccttccccgcgccaggtggtaaatggccacccagcacatgttccgagggcccacggcagccagagagactgcaaactgcctgcttaccctcttctctggtgcccctgcccaaggctgtgtggttccccaagaaccagggaagcctcgttggcaccccgcgcctgccctctctccccttcccccactaagctccctgcaaggacccctggagcagcttcccggctggtccaagtcacccctgctgcagccagcgcaggggatggcccatgctgtgggcggcccgatggacgtcctaggcagccaaacccaccgtcctgctccccgccacgctcggctgagccctctggggaacagaaaggacactgccacaaaggtggccaccatgacctcgatggcagagtgggagtggatcccatcagagaccagaaagctcagccttccctcaagctctccagacacacccatcctgggctgtcaccaagttcactaaccagaacaacacctagagtggtcaccatgtgcccacaactcctcattcattcattcacccattcattgattcagttaagggcacttcccaggatacatagggaaaagatctgggttcaagcttcctggatcccagacaagtcacttatggtctctatagcatagcttcccaacctgagaagtgggactcatagccgcctctcaggccatgactgtgatggttattctgggctgggagagctgctggatgagggtgggatgcgttggcagctgcaaggctgggcccagtatgagggcaaggtccagaggggaggggcctgcctggaggctgggggatgcaccaaaggaccccaacagtcctttccaggcaaggatgcaacaaggccaggagacaaggcctgtgggggtaacattcctgccttcagggcagacccaccggagagggtcagagggaccccccgccaccgacctgtgagggacccgggtggcttccaggagccccaggcccggaagtcactcatcctccttttcctcagggattagaacacatcgtgacgtggaattagccacgggctcagcctctgaaaagaggtggagagaatcgggagatggggatcttccaaccagggagcccctccctgcacaggggcctccccaagtctctgcagggatggggggatgaggaagtgggggtgccagcccccgggagcagcggggagggctggtgcggggctggagtgggcatctcagcatttgcatggagagctctctctggtgctgaattcatgcagccgcctgtgtgattcctaaggcgagacgaatctccaggccgcttttctcagcaggaacaaggcttttcttcaaatcgatggtgacacatttttaaactccgatattaaggagggaaagattttgccagccccccaggggcaacccttattagtcacaggctcatctgagagaaacagcaacagcagacccagtgggcctgagcaagacaagaggcccagaggccagctgccgtgagcacgacacaggggagtcgacagtgacaaataggagggcagcggcgggggggtctcctgagctggggcacagccatgtgaggggcgagcactttgggatgggctctggagcaagggataaaccatccttgggggagataaagaatagttggtgaggatactagagaggaaaaatgaagaaaaaaggccaagaggagaaagaaaagaaggcattcagctgaaacttaaattgacttccaagcttggagttatggatcctaaaatcttgttacaaattttgcagtggctgctgggaagctcagagctgcatctcatattcagttgcaacagatttgctcagcctagttttgaggtgtcatctgggccgggtcaggagaggataccaggagccaagatacccccaagtagccatcgagagtgtaaactacaagggcagatatgagccgtagttcctcggaaggccacacaccagcatcgagtagcaggtgccagggcagagagcaggccgtgaccaggaaccaggcaagaggctggtggcctggaaagcacgtgctgagggcatccaggccgcagagttccaggtgggaccaggagcacagttcttaggagatacccagctcagcatcccctgctgtggcttggttctttttgttcctgttttaatggttctcaattttactgttcctatttttcagtggaaataagtaaatgttttttaaaaaattaatgccaactcatatgcccatttccttggtgacagcagtcaccatttactgaattccaatgacttgtcaagtgtttgcatgcaccatcctctgccttcagaggggacatcgctctcctgggtttacaggtgaggaaactgaggttcaggggagaggtgtatcccggccaaggtcacaagagctagcaagtggccacagcaggacttgaacccagccctgtcccatgcgcaccggaaggctcctgcctccttgttaggaggaagaggaggctgggtggaggccgaggccagggaggccctgagaggcagtcagctgacccacagaaccccctccccggcactgcctggtctcctcccgcgcaaacataccccaccttcctgtgaccctcacggggaaagctccccgcaggctgccagaggggatttagctcctttgacaattgaagctgcaaagctctcctcacaaatgtcaattctgggccatttgcttcgtagattttaatgttcctgtttctcctcaacgtcctcagcaaggtagctcttgcttttcaaaagggatgtggcgtttgatgatgtttaaaccgtacctgaaatacagccaggcggcaataataaaacagccgcgggccctgctggcagaggaatggctgacagccgggcctctctccccaactgcgatgccgctcggctctggtttttaccgcaattacaatgtccgaagacagggaggaggcagcagcggggaggaggagagtggggaatgggcgttcaagggccacttgttgccgccaggaggtgggtgccactgatggggattttttttttttttaagacagagtcttgctctgtcgcccaggctggagtgcggtggcaccatctcagctcactgcaacttctgcctcccaggttcaagcaattctcctgcctcagcctcccgagtagctgggattacaggcacctgccatcatgcccagctaatttttgtatttttgtagagacagggtttcactatcttggccaggctggtcttgaactcctgacctcaggtgatccacccaccttggcctcccaaagtgctgggattataggcgtgagccaccgcgcccggcccactgatgggttttaatgaaccgaagggaatgccagccatgcctcagtggaggaagccgccagtgacctctcagccccacctctgctcactgcctcccgcaccactgtcaggacaagctctgtcctggtgcccatcctcccccggatctgcagcccacatgctctccatgctcctgcatcctcccgtcctccctggcttccatctcctgacacccggcgcggatataaacagccgcgtccctgcccctgccaggagtggacagagcaggagactcccacacagccgtgcccaccagggcagcctgcttccccataagactccttagccatgagccatcatgagttcctgtatgtccttccaggggcaggcatgctcgggctgcccccaccgcagaggagccctgtccagggacggagacccagagtccatggagctgcccctgccctcgaggggctcggagtcctgtgggtggtgaagtgagatccctcactgctaataacagtcactaccgtttatgagcccctccagtgtggtaatgcatttttttcctattaatgcccccataaggaacagatgggaaaccccaaggcctaaagaggcaggggctggccgggtgcggtggctcatgcctgtaatcccagcactttaggaggtggaggcgggcggatcacgaggtcaggagatcaagaccatcctggctaacacggtgaaaccccgtatctactaaaaatacaaaaaattagccgggcgtggtggcgggcgcctgtaatcccagctactcgggaggctgaggcaggagaatagcatgaacctgggaggcgaagcttgcagtgagccgagatcacgccactgcactctagcctgggtgacagagcgagactcagtctcaaaaaaagaaaaaaaaaagaggcaggggcttgcccaacatagtggaggaaccagatcttagccagttctgtctggtaagcagccactgccctggcctctgggacctccaaagctggccaaccaagcatgccagcgccctccaccccacccctgaaggccttcaggggtcttctctggcagcttaggcctcagcagatggcagccaggccctgacagggccacttcagtcacctggcttctctggggacatcccctgtcctagcccacctcacgccccactgcacaggccgtttccatgtgaccacacatctttcccaatggaaggcagagcaggcatggaccgccttgctggcagtggggagtgaggggcccaggctgcctgccctgtgccctcatggtcaggaagcccatccaagagactctggcagtcaggagagggccgtcccctcggccatgccaggtccagcaggtgactcgattccctaccacgaatatgggaaggaggtgccttcagcctgttcaggatagagggaccattcccccgttcccagccccaccaagggctgggtgcagggcaggtgctggctgatgggatgcccggttcagcgggtctcagcagccctcccagagcagcagctatggcaacaagaactagagctggcatctcctgggcgctcactctgtgccagacactgtactgagcatcctacacaagcagtctcctctcaaacccacagtgctgggggctgggtccccatgcactcttatccctgttttacagacaagaaaacaggctcagagaggttaagtgatttgcccaaggtcacaaagctggtacacggtgaagccaggacttgtacccaggactccaactcccagttacaagatgtcccatatggccaggcacagtggctcatgcctgtaatcctagcactttgggaggcctaggcaggaggatcacttgagcccaggagtttgagaccagcctgggcaatatggtgtaaatccacttctaccaaaaatacaaaaattagctgggcatggttgcatgagcctgtggtcccagcaactcgggaggctaaggtgggaggattgcttgagcccaggaggtcaaggctgcagtgagctgtggtcacaccagtgtactccagcctgggtggcagagcaagaccctatctttaagaaaatgtccacatggagaatccacagtagatggggctattcgtggtgggggaggtgaggagacggggcctgggtccttgactgttaatcctgctatgtcctggaggccacgccaagctggcaccaggcccggccaggactcatccaggaagccccagggtcagggtctggagagtgtctgagcccactctagaggtctagggaaaagattcaagtcaacgcacccacagacattgccatctgcacagagccggggagcgggggcactgtggccaccacgtgctgctgcagccagaccccttcatatcctaggcacacagagtacccatccgttaaacgggcaggcaagccacggcctcctggggagccctgaaaccagctcggctgtgccttgccaaggaactggcggatcattccaggagagcgagccaagggctgcagatccagcccttttcatgcttggccaatttaatggtccccattaatttcaaaacacacacattcccacaagctccggcctcctcggctcagtgctcgggtggacagcacaccggggacgcaagcaggggcacaggtgcaggcgctgaggcctcaaggacaggaaggagccacagaggatgtgctcgggacactgggcacagggtaggaggcagggtggccaccccatgtgggggcagcagactcctagctggggttttctaactacgagtctgccgcgagggggagaaaaggcccttgggtttgtagttctgctttgccaccttcctgctgtgtgaccctgaacaggtcactgtccccctctgggctttagatcctcccctgtcctcctctacaggacgccaaatgccaggagggcaggcactgggttacactgggccttgtacctccagcacctcaaaaggagccaggaacctcataaggacctagaaatgcccaccaccatcctaatctgtaaaatggatcagccccttcaggcctagaggggtggggtagggggctgggctaggcaggaagaggggacttagagggtgtcactgattcgtgcagcccctcccaccatctgaccaactctcaagggcatggagtcacttattcattcaacaaacatcaggtcagacatggtggctcacacctgtaatccgaccatgctgggaagccaaggcaagaggatgacttgagctcaggagtttgagatcagcctgggcaacacagggaaaccctacctctacaaaaaaatttacaaaataaatctactgaaacccaggacagagagctactgggtccacagtctactctcacattccccatggaaatgacagaagaacttcaggtaagaagcaggggacggggcggaagaccttggggtggaaggaccctggaaggtcctttctgagtgccgccccccagccaatgctccactcactggaccagaccctgcgagcccacaagggcatctcaataattcaggagggatccatcatttatgaatttatgtaaccactgcccgatcttgtggggatgagccgccctcctcttgcactggcggaaattagctcctggctgtgtctgggtgttccgggctttctaatgtggggagggggcctcttggaccccaggcatcctgactggcccccctgatcaactctgcccctcacttccagacgacccagagggagctggtgaaaaagcaaaactgggccgggcatggtggctcacggctgtagtcccagcactttgggaggctgaggcaggtagattgcttgagcctgggagttcaaaatcagcctgggcaacatggcgagacctcgtctctacaaaaaataaaaaaattagctgggaggggtggcatgcctgtggtccctgctactcaggatgctgagatgggaggaacgcttgaccccaggaggtggaggctgcagtgagccatgattgcaccactgtactccagcctggggaacagtgtgaccctgtcaaaaaaaaggaaagaagggagggtgggagggagggagggaggaaaggaagagaggaaggaaagaaaggaaaaagggaaagaaaggaaggaagaaaggaaagaaaggaaaaagaaagaaaaaaacctgatggtctctctcttaaaccccaaatctgaaagatgagggtttgattcccagccctgccttttacccagagccgtgacctgtgggtgcctcagtgtcctcatctgtataatgggggaaatgtcagtgcctgactcagacacgaggcaacgtgtgcagcgtgttgagcagaaggaacactcagtaccaagcggcaggtgacaggctgccctcagtccagagccggagctccatggggcatgccggggacttgagggggcttgggacacaggataccgggcaggctgagggagctggagcccaccaggaggcctcaggggacccaggagcccagattcagatgttggtcccatcttttttacaacgacccctccccgctgtggcaaacttctgccccacctctcagtttcctggccgtgaggacagacaggacacacccactctcagaactcaaattcatcaaccaaaaaaaagagaacagagaggaggtattcccttcccccaaccccgacacacacatacacacacacacacacacacacacacacacacacacacacacacacacaatttcctgggggctctggagctcggcaaacctcccatcccagctctactaccatttagctgtgtgacctttagcaagttgtttcacatctctgagcctccatttcaccattagcacaatgagactgatatagtgcaagagagattaactgcacacggtatgaatgcagcctagacctagagggagacacctcccaccccaagctctgggtctccctgtccttattatcttatgctccctgcccccatttttccacctagcagcccaagtgatctgaccaagcccccccaactcaggccccggccgtggctcactccagacccctcagagccttcccacagtgtcccgtccacctcgcccctccctgtctgtgctctctccccacagaatgctcttgccccgacttctgacttagcaccccgtccaacccaagcaccctctcctccaggcagccttccccactgcttccctcccctgtaggccagactcctgcctctcatgcaccatggttccttttccattcacatgtgttaccccttatccggaattagagactgtgtcctttgcagcccaggcccaccccacggcgtggtgcacagcagccgtatcatctatgtatgttgcatggatgaaagtgcctgagttcgaattctggctcagtcacctgccgaggtggggcttgttatctgatccccgaaaatggggtaacaatcctgcctgcctctcgggcctctgagagcactgagcacatccagagtggccagggcaccggaaagtggcccggccccacctgctcttggcttccccgaggaggagggagcccggccccacctgcgcttggcttccccgaggaggagggagcccagggccaggcccatgttgctaacaggttccagctgcaaagtctgctgtacagccagccctggactcgtcgctggcccggccatctcccctgcccactgcggagaggtttctgctgtcgtggtggccggcaagcctcagcaaacacattaaaatctgaagtgacagataaagcgatttacggcgacagttcagcgtcagatcacttcccacaaggcagtccgcatccctgcggggcccctgcttggtagtccatcaaggcggtctctaaatcactgactccaagcagtgcccagggacagccggacgcaggggcgggtggccgctcaggtggccactcaggttctggcctgctccttctcaccaggccaggctctgctgggccctccaggcggcaggagaggatgaggcaggggctgccggtgcttgggaggagggcggtgataagcggccagcagattctcacaaatcaaagccccaagacttaaggagatagagcgccacttcatgacttattttaaataaataagcggcttaaaaatctccctgcgaggtcggcttgtcgctgtgaaacatggcttcccacccgtccccgccgcacacctgggcccctcaaaggctagctgacccgcctcgcctcccgccacctccttgcagaattaattggtccctgcggcgttgcgtggcactttgttcagaccttgctcctagcactttgtcacattatactctgcttagtagctctcgctcctgacttcccagtaatcatttcctggggactctccgtgtgccaggccctgggcccagggctggacaggcctgaactcctgtcctcctcacccctgcccttcggtggaactgatgctgatgccatttctcagatgaggaagtagaggccacggagtggccagcaggggtgctgggaccctgacctgctcctggccacggtgcgcacagcccatgctcactgctctgggctggcattgaaacaaaagatcccttccatctttgcacaaagcctttcatccatctctgccctgtcctcttatgacatgaaggccaaagccaggcagctggacccctgggttggccaagaatggggatttttctttttttttgagatggaatcttgctctgtcacccagcaaccaggatggagtgcagtggcacaatctcggctcaccgcaacctccacctcccaggttcaagcaattcttctgccgcagcctcctgactagctgggactacaggcgcatgccactgtgtccggctaatttttgtatttttagtagagaccaggtttcaccatgttggccaggctgctctcaaactcctgacctcaagcgatccgcccgcctcggcctcccaaagtgctaggataacaggcgtgagccaccgtgcctggccaagaatggggatctttctttgtgcccggacatgtcctgcccaggactctgctatctgtcaggaacaagaagtccacacacacaggtctggtgcaccaggaaactcaagggcagggaggtggcctagtcaaggtcactgcacccccgtggtaaaaaggagacataaacaccctggcagccacagcaccccctagtggataccctgagaccggcgctctccccagacacaggactgaggtcataggcaaggctggagaggcaggcaccggctctgagaacctcctcctccagaagagggggcctgcgggggctccctggcttatctcctgcacatggcagcccaatttcattaagacggatgcgccatgctcctgtgggcaggagccgtggccgacacagatggcaggaacctgagactctcccgggtgctacccaagcaagtggcctcagctggcagcccacggggacagggcccagggaggcctgcactgtgcctgagggtgtgggggtttgttccgtccctgcaacttcaagccctgccacccgccagccaggcatccccacttctatgcttctgcccaacctcccacctcactcccaccacatcccatacaaacacacatcacaccacacacaccctccatcacccacaccccatgcatcacacaagcacagacacacacacatcacgcacacacacgcatcacacacatcatacaaatgcatacgcacaccccacacacataggccaaactcctgacctcacacacacactctatcacacacaccccacgcatcacacaagcacagacacaaacatgctacatcacaaacacacgcaccgcacacatcacacacacaggccaaactcctgacctcacacacacaccatcacacacatcccaatcacatctcatagcccaataatgtaagagtggaaaccagtcctgaatttcaaatgccaggagatcagtagggaaacagaatctgattttcttatttttatttgttttttgagacagcatctcactctgttgcccaggctgcagtgcaatggcacagtcacagctcactgcagcctcgacctcccaggctcaagcagtcctcccacttcagcctcccaagtagctggactacaggcatgcaccaccacaccctactaatcttttttaattttttttttggtagagatagggtgccactgtgttgctcaagttggtctcaaactcctgggctcaagcaatcttcctgcctcagcctctcaaagtgctgggattacaagagtgagccaccgcctgcagcctcagagtctgattttctttctttctttttttttttttgagatggagtctcactctgttgcccaggctggaaggcagtaacacaatcatggctcactgcagccttgacctcccaggttcaagcaatcctcctgcctcagcctcctgggttcaagtgattctcctacctcagcctcccaagtagctgggattacaggtgcatgccatcacgcctggctaatttttgtatttttagtagagatgggatttcgccatgttggccaggctagtctcgaaactcctgacctcaagtgatccgcctgtctcagcctcccaaagttctgggattacaggtgtgagccatcgtacctggcccagaatctgatgttctattatatatatatatatattttagatagggtctcactctgtcacccaggctggagtgcagtggcacaaccatggctcactgcagcctcaacctcccaggttcaagcaatcctcctgcctcagcctcctgagtagctgggattataggcacacaccaccatgccgtattatttttttttttgtagagatagagtctcactatgttggccaggctggtctcaaactcccgagctcaagtgatcctctcgtctcggcctcccacggtgctgggattacaggagtgagctactacgtcccgcccagggtccgattctcaatggcctgacggaggtcacaggcagatgcctcttcagggaggggaaagagtgaggggggcgggcagggggacacctggcaactgccctctccaaggatccccagggccctgctgagtggcaagagagatgcccacagcctggctggagaccccttcaaccccacagcttttcaggatggaggagggtggggggttgggagctctccccgccccctttccctcacagccctctcctagctcccactgcacccttcccctccacatccctgcagctggacccaagcccaggcagcgacagcccctcccatatggcagcaggaacaaagagaactgttccccacaacaaaatccagaagctccggcgggcggccagatctcaagctcccagcccagtgtgacccacggcgttctccatgggccactgacgcccgcggggccagcactgctcctggcttcaaaaatataaatttaaaaatccccaccccaagataattgctctctcctctggcttattgtggtggctccgtggtaggcactgagaagcaattattcacggctaatgattataatcaagtcaaatagaatttaatggacacgtattctcttcctgcttgaaactttacatatgaattaagcacatatgggtttcacgaggcacagacgcagatttatgcagccccgaaaagccctgccgttgccaacgacttttattccactaataaacaggctgatatatgggctcctgggaactgcaatctctgctgccccctggtgggcacaggggctggggtgggagccaaggccacccaggaccctggaggcctgaccagtgccaaagccactttgaacgctggggttccacaaagccctggacggctgaaaggagactcgggctctgtgtgggaagcccgtgttcagaccctgcctccgtcattccctgggattccaggcgggtaccgggtcctcctggctgtgagagtctagaacaaaaagatcccaggagaacacaccaagaggtgtatgggtaaactgaggcaagcagggggaggtgaaagctgatcatttgcaggaggtaccatgtccctcggcaccgctgggacaggggtgatgcccagaacggcgctgatgacaccagtttcagcaccagtgcgaggtgctgagccccgattcccgccaggtgctgagtgaccgtcatttgcacgtcacgtgcatcagctccgagtgcccccagtaacctgacgggtggtttcttcaccaccctcattttgcagaggaggaaacagaggcctaggcaaggacacagagaaggggagtccacagagaaactcagccagcactgccccagccctggccctggtgcaaatggagctggcactaaaccgcttctgatggagctgctgcatccaaaacctggcgactcccaagggcacttaggaagcagtgttaatcacgcccacagcccgggtgcagcctccggagcgcccccattccatctgaacccatcaacaccccaccttggtccctgcaccctttctcctggcccatgttgcagcgaaccaccaacccaagggggacagagctcacaagatgcctcattttccctccggccactttgcagctcagcaagaaggtaccgctgcagtacctctcacacgcttgccagtgactggcagggctggagtacccactggcctgcctgactgccccctcagccacagccccaaggctctgcccttctgctccaggccagcccctcctgggcacaggcagcaagaacgcccttctcccctaggccgctgtaatgtctgccaacccagatgtggctttgtcttagctgtgtgtcctcagatggactagcagttctcatcctagtggccctagagaaacacaccagaaccacctgcagaagcccaaggtgaccctagctctccctgctgccctcagccagccacactgagcagaaactcctgcctacgtgtaacctgtcacctgtgtgcctagacagggaatgtgcgggcaaggcacccccatatgactatccagctttgcagtcaacagtgggaagacgcatagagcaaggttgcttcaggaaacacaactcagaccccacggaccaggcccggggcggccgagtgaactcccctctccggatcctagagcctgtcactcacagagattaacggaaatgctcacagcatcagcaccaccatgccccagagtcactgggggacagcgctggggccaggcacgaccgctacaagcgcaaagtggggacgaaggagactcgagaagctcctgggggtgccctgggcctgcacaggttagggaggggctggcacagcagggttttccctgtgagctggagcccaagacgagaggacctgccccccatattcagggtctgagaaagaggccccccttcctccaatgcttggtgcagatgccaggtaagcaaaggagcaagcgagcaggcgggcgagggccggggttcagccgccactcaacctgttccacaagccacctgctcgacttaaccagcccttggcaccccatgccaaagtcctttcctggcgcctttgaccttgccagacaaccactagctgtgtggagtagcagcccccttcctccctcccacaaagaggcagccggctcccatactcatcacaataaactgccaagccagcaagaggcgagcgcaggaagctgagcagctcctgtttctaggctctggaaagctgccagggcatggcaggggacctctctgcccccactatccctcgacaagctccctcacccgcccaggtctgaagcgggggcaggccaggccaaaggcagaggaaggcaggtgctggttggggcttctgtggccccccaaggtcagacctccccgctgtggcctctgccttcctggcagggcagcccagtttcagcccagctctcccccttccccggccactaatgggtctcagtggagcaaggcgcccccgacacagcaggtcagggtttcaagggaagaggagcccgagtggccgacacgttgggctgccatggcgccagcaggctgtccttgccagcaacccgagcctcactggagccaggtggcgtccacccaggcctggcacagcagagcagagcaaaggcaacagggcggccaccaggtctctggttcaggccagccactcaccggcgttgacgatggcgtccacctccagcttggtgatgtcgctgcggagcagggagattttctcattgagctgcttgtcctttttatacctgggctcctccaccttcacagccacccctggaacaagtaggggccggggaggtcacagcgaggctgcccactgcagagggacccagccagggcccaggggccagggccttccctatcgacctccctccacctccaggggcagcctgcagcacgatgactgctgacccagtaccaggaacccacactgaggagcacctactgcgtgctaaaatcacgcggggactccttgcatcttcacagcaaggccaccagcaggtacagtgccaatatcatctatcccatttcacagaggtagaaactgaggattaggtgggtcagagacttgcctagggttatgggtcaccaggcctgctgtctcaccaacacaccccactgtaagcaaccaaatcgcagcttcaaaccccagctccccacaagcaagtaatctcgggcaggtggctcacctaacctagggctctgtttccaaccatacaatggggataaaaattgcacttgttgtgttaataattgaatgagatggccaggcgcagttgctgacgcctgtaatcccagcactttgggaggccgtggcgggcagatcacttgaggtcagtagttcgagaccagcctggccaatatggtgaaaccccatctctactaaaaatacaaaaattatccaggcatggtggtgcatgtctgtaatcccagctactcaggaggctgaggcaggagaatcgcttgaacccgggaggtggaggttgcagtgagccaagatcgagccattgcactccagcctgcgcaaaaagagtgaaattccatctcaaaaaataaaataaaataattgaatgaggtgatacacgcggagcacctgcctgcagcaagcactcgatacatgccactggactagctcttcttgtctgcacaattctcccaagccacgggtctggagcctgcccaccagggcctcccccgagcagggcctacctttcgccatctccttccatgtcgggatcttcttcagcctgacaaagtccttgcagaagtaatgttcctcccgctgcttgtcactcaggcccttcagaaaggctgcagaggcaggaaggaggatcagggtgggggcagaggaacgggcctggggcttgcacccccacatctcctttcttgcctcatccaagaatgcaaaccagctcttcctgtccctccttctctgggcacacagggcaggcatgctggggaaacctcagaggcccctagaatatcttgtcctgctctctttgttcagggagggaaactgaggtctggggaggctgagggactggctcaggcatcgcagacctgggttgtgatgaattcagctctgccactttccagcagcgtccacatctctctgggtcccccgtttctccctgattagaacgggggtgaagacgtcccctgcagaacagctccgagcttcctcccacacactaaggccaagccggttggcagcactcagccagcgacattatccatcagtcccaccgccagtcagttctgccctcactgtcactgcatgcaggcagcgggacagctgtcctcctccaggagctgcaggaccaagtggacctggcacctgtccccaacatcccccccggcagcggctgagggctcccagcatgaccaatggggttggaatcgttctcgttttacagatgaggaaaccggggctcagggaggttgggaggccaccctcacacagcagggacttgagtgaggagccaggcaccccccacccgctcacagactcggggtccaccctggccggctccccttgcctgagcactgtcccatgggctccgccttcccttgggggtggcaccaggcacagaaacctggaacccgtctcagaagggcccgccccgaccgcgccaggccaggctagcagctcacgggctccccctgctggcccgaggccgcctgcacacccaggcgctcagcccagcctggcaccctggaccacaggctcccgggatggggcagcccccacggcaaacagcaaaggctacaattgagaaactcaaaaagcatcaaaaaatatgtagaggcgggagagcaattagaggaggtggtgagaaaggaaggactgcagcctggaagcttctatgcacatggcagtgagggggacaggtaggtccctccacaaatgttcagggaggttgggaggccaccctcacacagcagggtgttttcccggccagagtcacttcatcatccaggcctccatctcctcatctaaccactgctggcaggggtgataacaacccaaggatgctgagagcattagatgacagaactcatgcaaggggcccagtccagagtccctgctggatgcaaaggtggggtcatcacaaaaggctaggcccacccctggtcagcccccactgctgctcaagccagagccacctttcctggcagccacttctgccccctcttccataaacatgtttgggcacgagtaggtcctgcattcagtaccagcgctgccacctgccaagcccacctcccagaggactcactgctgcaggtccccctccaccaggctgtcctgcctgccctcaaataatcccgtcccctccctcaacgcccgcattccacgcccctgcagctgccccctcctctgctgtctccacttcttccctcccatgctcccttcagtccacccagtctggtccctccttccaacaaggtcaaggtcaccacaccccatgcagcggcccctcctgccttccctgtggacaggaagtgtccttgctgctttcctccctaggtcttctaatcagttgcacagattcaaaacgctctttaagcaagcaacctccggggctgtccctccactctcttctgagcctctgacccccacagtgcctgcctgctctcattccccaaagcccaggcatgcaaaacagaacgtttgactctttcccccaaaacgtcatttttttgttgctccattcttccctcttttttactcgagaccctgcaccaggggtccctccctttccatcctcttttggattgatccccgtgacaccctagaaaccaagccttcctctcaccctccaggactgagccttcctcatggctccctagatcccacagacgctcccaactcccagctgatctccgtgtgcatctcatccccatctgttccttgaccggcagccatggatcctgggaacataaatcaggtgccatccctcctctgttcaaaactgcattcaaacgccggtcctctggcctctctcccacctcactcccaatgctgcctcccccactacaccagttccccaaacagccaggctgcttcctgccccaggccctttgtacctgctgtgctctgcaggatatgggatagtttgcttttgtttacacttattcttttatttttttttgagacggagtctcactctgtcgcccaggctggagtgcagtggcacgatcttggctcactgcaacctgcactcctggattcaagcaattctcctgcctcagcctccctagtagctgggattacacgcgtgtgccagcacacccaactaatttttgtattttaatagagatggggtttcaccatgttggccaggctggacttgaactcctgacctcaagcaatccacccatgtcagcctcccgaagtgctggaattacaggcgtgagccacggcgccggccccctttcttgatcttggccatcttgacctgtaggttccataggggatctgctgtgtttgccatcagattcccaccacctggcacggtgtgtgggcacctgagggtgcctgaggggcacgctgaggaataaatgagccaagaccaaaggttgagggcgagtttgctaagtacagagtcttctaggcagagggaacagtatgtgcaaaagcccagaggtaagagggagccagagatgatcccctaattaaaaaagaaaaaaaagagagagagcatttgggtggagaaagtgaggccagtcggtctctccaggtctgcctccctgtctgaggacggacagatgctggtggcagccggcctagacccaggctgcgccttttcttctgttataggtcccgccaggtttgggttcgtgacctcccaacaccatgctcagtttgaagccttgggttttcccatctctggaatagggacaaggcaggccttcccttgctaacacccaggcttgctgggagggtcaaaggagaaggtggctgtgtgctgcaaagtgcggtctacacgccagacacactcactccttcctggcggctaaataatgcccaaagagaacaaagcaaacaggacaaaattgtggagaacttttttttccaacttggggacacagcagccggaggaacttttctaattatttgggtccccagcacttggggagaccaaggcaagccaatcacctgagcccaggagttcgagaccagcctggacaatatggagcaaccccatctctaccaaaaaatacaaaaaatcagctgagcggccgggcatggtggctcacacctgtaatcccagcattttgggaggccgagacaggtggatcacctgacatcaggagtttgagatcagcctggccaacatggtgaaaccccatctctactaaaaatacaaaattagccgggtgtggtggtacatgcctgtaatcccagctactcgggaggctgaggcaggagaatcgcttgaacctgggaggcggaggttgcggtgagctgagatcacaccattgcactccagcctgggcaacaagagcaaaactccatctcaaaaaaaaaaaaaaaaaaaaaatcagctgagcgtggtggacatgtgcctgtagtcccaactgcctgtgaggctgaggcaggaggatcgcttcagcctgggaggtcaaggcttcagtgagctgtgattgtgccactgcactccagactgcccaacagagcgagaccttgtctctaaataaataatttgaatccccatatttgtcaccttgcacaactgtgacctccccactgcgaggccttggcatgccactgtgtgggcactcccagacggctggacctgtggccagaaagtcaggtacccaccgtgatgctggcgggactggtgggctgggacccggacggaccccagaggccttgctgaagtgtctctggctgggcaggccctgggaatcccatggaactagaccagcgtgaccagagacacctcaggtgccctagcagatatcatctggcagatgccaccaccttgttctagagaggaggcagagtgacctgcccccagtcacacataagcgagaggaacctgaacttgctcccacactgccctccctaagcatggtagcctggtctgagtgatccacagcccacaaagccccttctctccagcaaagcccacaggattgctccacttcccagagacagcatgctggctctgccaccagctggctgggcgccgaccttgaggacatctgtcagcccgtcccttctagtctatggacccaagtgcatgcctcagaaggccagcaggccagacagcatgtctgtcctcaccaccagaacaaggctgtggcctggctgatccccaaagagctacacactgcactggtttctgatttatggggaaagaaaaggccaactgcgcccattcagcatctcacctccatgtcctcttatcggcaatcctcgcccgccaggcccctctttgttccccctggaggagaaacaggggccttaagccaggaacatgccccacgcatttctgtgttttttttttatttttttgagacagagtctcactctgtcacccaggctggagtgcagtggcacgatctcggctcactgcaacctctgcctcctgggttcaagcaattctcatgcctcagcctcctgagtagctgggattacaggcatgcaccaccacacccagctaattttttgtatttttaatagagacggggtttcacgatgttgcccaagctggtcgtgaactcctgacctcagatgatccacctgcctcagcctccgaaagtgctgggattacaggcgtgagccaccgcgcccggccttgccccatgaatttctaacatttcccacctcctcctgtaagaaggacaaatgcagacttaaagcacaagtgagttttatttgttataaaagatgtaaaacatgcattttcattttctttcatttttgaagaggcaagagtatttcacagttcagtgagataggtgttgtaaaaagatgtccgcagtaaattttgatggagaggcctgaccccagacgaagcttccagcggctcccaggcacgaaagccaagcaggaggaagcaggctccaccagaaccataaagtgcagcgggcgaatgggaattcaatgctgtgttttaagaagtgtctttatggcactttgcaagatggtgttcagagaggtgagggcaggctggggcaccaaggcagggctcctctcagagagaatgccaggtgggcagggctgataaaggctgggctcccagaatgcagcggcatttagactcggtggcaggggcattaatcacctgcgctcaccggcccgcaagaacagggtcttgtcaaagcccacagctcgagcaaaagggagacggagcacgcagcaccttggagcccctctcctctaccctgcccccttgtctctgcccacaccagggcattggcaaggctgcgtccccaaaagacaggtgggagaagccccccgactcccaggggtacctggaaaatttgccagtgctgcagtcaaatcagataagccatccactctggatgaaatcccacgggggctgaaattagccctggcttctgcacagtgtggtgtgaggctggagcgtagcagccccaccttgagtcaccaaggagaggatggcttaggctgtgcatgctcagggccccagcacgtgagacaagcctacaagagcccagtgtcaccacggccagcacagagcagagagaggagacaggcctgagggcctgaggggtgacaaggaaggggaggctgctgggacccattctgggccatgatatataaaatcatttcttttcttttctttttttaattttatttttaggagagacaaggtctggatatattgcccaggctggtctcgaactcctgggctctagcaatcctcccaccttggcccctaaagtgctgggattacaggcgtgagccaccacgcctggcccaaagtggtttctaatgtgatcccagcacaacctccaagcaggtgccattggtcccattttatggatgaggaaactgaggcttggagagcgaggaagcagcagcacgtctccacatctgacaacaatgtccctgctctttgtggctcacagctctgcctgccaggggctgttggaacaaggacccaaagccaggcccctcctgtgatgatacagcgccagataccgacaagggcccaacctaagtccctcatgcccaactgcctttacagtgagggtgtttccatgatcttctgatgaaaaggcactcccggggggataaagaagtgcctcaaaactgagggtattcaattagagaaagtaggacgggcacagtgactcacgcctgtaatcccagcactttgggaggctgaggtgggtggattgcttgagctcatgagttcaagaccagcctggccaacattgcaaaaccccgtctctgcaaaaaatagaaaaatgaggccgggtgcaggggctcacacctgtaattccagcactttgggaggctgaggcaggtggatcacgaggtcaggagttcgagaccagcctgaacaacatggtgaaaccctgtctctactaaaaatacaaaaattagccggtgtggtggcacaggcctgtaatcccagctactcaggaggctgaggcaagagaatcgcttgaacccagaaggcggaggttgcagcgagccgagattgcaccagtgcactccagcctgggtgacagagcgagtctccgtctcagaaaaaaaaaaaaaaaaaaatacaaaaattagccggtgtagtggcacacacctgtaatcccagctactcaagaggctgaggtgggaggattgctggagtctgggtggcggaggctgcagtgagccaagataccaccactgcactccagcctgggcaacaaagtgagaccctgtctcaaataaataaacaaacaggccaggcacggtggctcactcctgtaatcccagcacttcaggaggccaaggcgggcggatcacctgaggtcaggagtttgagaccagcctgaccaacatggagaaaccccgtctctactaaaaatacaaaattagccgggcatgggggcgcatgcctgtaatcccagctacgcgggaggctgaggcaggataattgcctgaacccaggaggcagaggttgtggtgagccgagattgcgccactgcactccagcctgggcaacaagagcgaaactcggtctcaaaaaaaattaaaaaaacaaataaataaaaataaattagagaaagtaacccctggctagtaaaatcagacactgctgaagtgtccccaaaagactgaaagtctcccagccaggaagatccagcctgaaggtatgtacatacctagagggagaatgggcccatggaaatgagcgtcagcctggaggtaaagaaaaggagtgtccagggggaagctgaatttggccgtcagcttggaggacaagctgggccatgggctgggcatccttccatgggtccagagcaggcactcagcactgcatatagatggaaataccgagcaaacgcccggggaaggggatccttgtgggtgggctgacccttctcaaacagggaagcttacctgccttgcccagggcaaggcttccaaaatcactcaaccagccctggataagatcgcatgctctgagcaatcctaagattacaatttggcttccatgaggctttcccatagggagaggaggctctgctcaggcacacctgagttttcagacccactgccattatatttccccaccacaaactgcacatatgccttctgacctatacgtcagtctcttgtgagtttggttactgtgtgccaggctttgagagaggatcctctcaggcagacaagtatttggaggcctatctaggtacagccctgaaatgagagcacatgtccatcagagacatggagagaatgttcaggaagccaggcacagtggcacacatctgtaatctcagcgctagcacttttgcaggcggaggtgggaggatcacttgagcccaggagttcgagaccagcctggggcaacataatgagaccctgtctctgcaagacatttttaaaaacattagccaggcatggtggcacatgcctatagtcccagctactcaggaggctgaggtgggaggatggtttgagcccagaagttggaggctgcagtgagctgtgattgcaccactgcactccagcctgggcaacagaatgagaccatatctaaaaaaaaaaaaaaaaaaaatgttcagcacagttttattcacaagaaacccaaatgcctatcaacaaaagagtgggggccgggatggtggctcacacttgtaatcccagcactttgggaggccgagacaggtagaccacctgaggtcagtattttgagaccagcctggccaacatggtgaaactccgtctctactaaaatacaaaaattagccaggcgtggtggcgggtgcctgtaatcccagcaactctggaggctgaggcaggagaatcgcttgaacccaagaaacggaggttgcagttagccaggatcgtgccactacactccagcctgggcgacagagcaagactccatctcaaaaaacaaaaccaaacaaaacaacaaaagagtgggaaacaagctgtggtacgttcatatgctggaacactatacagcaatgaaaaagagggaaccattgccacatccaataacaaggacgaactggccggatattgagtaaaaggggccagacttcaagaagagacaaaatgaacagatatcacaagagtgattagctccagacagtaccaagtgaaaagaggcgacttctggcgtgatggcaatgctctaccttttgacccaagtagtgactgcacagttgcatacactgtgcactgaagatctctacacttgcagcacttgactgtcaaatgtaacttggctgaaagtgtgatttgaatgtaacgatgaaaagtgtagcagtcttcaagggccacggctcagaccctaatcaaaggcagagtccagctggggcagccccccagatctcccataatgtgatggcttaaaaaatacacttggccaggcacagtggctcacacctgtcatgccagcattttgggaggctgcggtgggcggattgcttgaggccaggagtttgagaccagcctgggtaacatggtgaaacccagtctctacaataaaggttttaaaacattagcagcccatggctcacacctgtaacctcagcactttgggaggccgaggtgggtagatcgcttgagcttaggagtttgagaccagcctgggcaacatggtgaaacccagtctctacaataaaggttttaaaacattagcagcccatggctcacacctgtaacctcagcactttgggaggccgaggtgggtagatcgcttgagcttaggagtttgagaccagcctgggcaacatggtgaaacccagtctctacaataaaggttttaaaacattagcagcccatggctcacacctgtaacctcagcactttgggaggccgaggtgggtagatcgcttgagcttaggagtttgagaacagcctgggcaacatgtcaaaattctgtctctacaaaaaaatacaaaaaattagctaggcgtggtggcgtatgcctgtagttccagctacttgggagactgaggtgggaggatcgcttgagcccaggaggttgaggaagcagtgagctgagatctcacaactgcactccagcgtgggcaacagaccttgtctcaaaagaaaaaaaaaaattagttgcacatggtgatgcgcgcctgtacttccaactactcaggtggctgaggcaggaggatcgctgagcccagcagtttaagggtgcagctagctatgattacaccactgcacttcagcctgagcaactgagcgagaccctgtctcgaaaaaaatttaaattaattttaaaaattttggccggccacagtggctcacgactgtaatcccagcactttgggaggctgaggcgggcagatcacgaggtcaggagattgagaccatcctggctaacacagtgaaaccctgtctctactaaagaatacaaaaaattatctgggcatggtgacgggcacctgtaatcccagctattcgggaggctgaggcaggagaatggcatgaacccaggaggaggagcttgcaatgaaccaaggtcgcgccactgcactccagcctgggtgacagagcaagactccatctcaaaaaaaaaaaatttaagaaaattggccaggcccagtgactcacgcctgtaaccccagcactccgggaggccgagacgggcagatcacgaggtccggagatcaagaccatcctgactaacacgatgaaatcctatctccaccaaaaacacaaaaaaattagccgggcgtgatggcacgcgtctgtaatcccagctactggggaggctgaggcaggaaaatcacttgaaccccggaggcggaggttgcagtgagctgagatcacaccactgcactccagcctgggcaacagaataagtcttcatctaaaaaacaaacaaacaaacaaacaaacaaacaaaaattagccgggtatagtggtgggtgcctgtaatcccagctactcaggaggctgaggcaggagaatcacttgaacccgggaagcagaggttgcagtgacatcacaccactgcactccagcctggacaaaaagagtgaaactgtctcaaaaaaaaatttttttaagaaaataaaaacacaccttcaaattctttgagattctttctttcaagaggtagagcctaatttccctctcctggagtatggccagactccctgactcgattctgacccctagaataaagcaggagagacttcgaagacgaggtcacaaagaaggcactgcagctccatcggggtctcctcacgatccctctcgtggagcatatgctctgggggaaaagcttaggacatctatcccatgtgaggcactcaagcagccccatggagaggccccaaagtgaccaaccgaggcctctcaccaaatgccattttatgggagggagctgtttaggaagcccatcctccagccctaaccaagtcccacccggcctcagagggagggagaccctgagctagaaccacccagctaagcttctctcagtttcctgaccctcaagagatggagagaatgcaggtttgctgttttacgccactaaggttcggggtgttttgttacacagaaatagataactattgggggatctccacatctcacccccgaaagcgtccctctaactgtggcttcagtagcaggcagagccccagaccagccccactccttgggcctggcccactgtcactcaataacgggtctggaatatcattacccagctggatgcctcttctcaggccaccacccctgagacgcctcctctgatctccccagctcaggtggccccatctgctatggtgtcttcacagcactgaggttaccgggccttgtctcagctgctagaacacattctttacaatagatgctttgtaatcctcacaccagattacaagctccatgagggcagggcccttgcctatctgacacatgtctgagtccccagcctgaccacctagggggcgttcaataaaagtttgctgcatgattggaaatcccacctcgaagcaaaagggagaccccagtgacaacacagcagcccaggaaccccagccccatcacaaggtccggttgctttcctggcaccaaggagtggggctgtgggggctggatcctaaaaacagcggcagccctcgagcaggtgcctgggcaccttgtctccgtagctctttcccaccctcctgggttgttgtcctctgagagagtgctcaggggagcaggggtctctgtggggacagtggctccccctccaggggtctctgccagccccaaactcctcctgctgttctggggcaagggccaagtgcctgacaagttctccatctgctcacgggctaaagtcggtgctttctgccgtcacttttagatcctggcgcaggccacacaattcatgtcaggagtaaatcattttgatttccacctctggtcccgagaaagccatcttctcttcacccctaacaccgcaggacccccccatcctgcctgcccagcccagaggccacacctactccaccacggaggcccagccaattagccacttccctgcacttttgaaaggggatccagccgggaagagtcacaggatcccaggaggcaggccctgaaaggcaggggcagctgggtgcccggcagggctatttggggctcagtagcggcagcttgggttctctctctccccaggccccagactcatgccccctccaggagcaagaggaagtggtgtgattcttgaagggtgtcatcagttgtcacagggacaagaccccacctctgccctgctcctctaacctctgttcctggcatgagcaaactgctcacaagtggccagaggccagcgagaaggggaaaagggcgccagaccacgtgcccaggaaggcatcagagtgcgggcttggggtggggtggaggcaggacaggccagcccaggaaggtcactctgtgaggttacgtgccccaccaggtgggacgccagccccggagctgttccctcagccccattcccgaacacttaagaaccacactgtgcaaagtttggagagtccgggatcataacctccactttgccaccagctccgagtgaccttggggaagccagctgtggcactcggcctcagtttccctcctgcacagggaaggaagttggtaggtcctgcacaatctctggggtgccctgtgacccattccaatggggtaaggaaggccgccttcctcacgctgccccctgcgtggacacttggacctggtctggagtgaattgttctgtggggctgggaacacgcgcgggggcggggggggctgtcaatggggaggaggggtccgttccagggcagatggggcctcaacttccccaggtctctcgggtggaaggggctgctcgctcgttgggggccgcccagccgggaagctccacgtgaggccgccctctccctcgcgccccctcgtgcttacacttacatttcgcctccttccagtcggtggaggtgctcaggtccaccttcgccgccatggccaggggggcccaagtgcgcaccccggctgtccgccccaccgccgccgccccccacgccccaactcccgccgaggtccgcgcacggcggccgaacacgcccaggaacgccgggggaccgcacgtgctgctgcgggtcctcgtggcacccgccaagtgtccgggccgggggcgcggggggacgagcagctgccccgccgcgcgcagctgtgccaggcggccggacagtcggctctgtagagacatgagcgggcggcgcgggacggctctccgcccacttggactctatttacggcgctcgggagtgtctctcccttatttactctgggaccgggtggcgactgccagccagcggcgacctgctcggagccagcgggaggcgcggccagaaaacccgggagcgccgctgggcaccctggaacttgtagtccgggccgccggatgggcccacgcactcgtatacacacgtgcgcgcccgcccgggctcccagtgtcgcggatggagccccgcctgagcccttcgacttctcccgtggccgccaggcgcctcccctccgcgagacctcggccgcctctaactttctggttggctgagcgtcggcttccccggcacgggctgaagcccccgggccttccacgcagccccgggcccctctgccgctcggccccgcggcggagcaggcgcgccggccgctgcgtatcgagctgggagagcctggcgcggcttccgcagtgccgagcgttttgcagcctgggagacccgggcttctctccccgcgggtcagcagggcaccgcctccacaccccagcctgccctcctagggacaggtgcgacgaacgggtaaatccggtttggggacttctccccagagcctctgccttctaacagccccggggccaaggctcagctggagcagaatctaggacagctggggaggagagtcgagggtggaaatagtggaatttggaggcaggaaacttaggcttcaagtggcgttcaagggtggaaggattggggtgatgtttttgtgtgtgtctgtgtgtttttttttttttttcttttcttttttaaacaaaaaccggccgggcgcggtggctcacgcctgtaatcccagcactttggtaggccgagttgggtggatcacgaggtcaggagttcgaggcctgcctggccaacatggcgaaaccccgtctctactaaaaatacaaaaattatgcaggcgtggtggtgcatgcctgttaattacagctactcgggaggctgaggcaggagaatcacttgaacccggaaggcggaggttgcggtgagccgagatcgtgccattgcactccagcctgggtgacagaacgagactctgtctcaaagaaaacaaaacaaaaaacacgaggatggatttttaagtacttttatatatttttatgtactattaatattactttatgataaatataatgaatacaggccgggccattataataatataatgaatgtaataatgaataatgaataagtgctcacacctgtaatcccagcactttgggaggctgaggcaagaggattattagaggccaggagttcaagaccagcctgggcaatatagtgagaccccctcatctctacccgcccccacacaaaaaaattaccctggtatggtggtagacactcacctctagtcccagctactccagaggctgaggcaggcaaacacttgagcccaagggttcaaggctacagagagccatgatggcaccactgcactacagcctggacgacacagtgagaccctatctcaaaagtaataataataatgaatatattttaatacgagggaggaacgagccagggtttcagagaaggttctagt

SEQ ID NO: 349 - DNA, 420155 bp, Homo sapiens
  source 1..420155: mol_type = genomic DNA
cacggcaggaatggtgatggggaaagcagggtggtgggggctggggtgccaggaccctgggattgacctggggggtattggcagaggacagcccaaaggctagaccagggccccgttctgattatctgtggctgtgggagcagcatcctgtgtgggccccgctgtgctcagctgagacatggggctgtggccaccccagggctgcgatggggccgaacagtctgggactccgggtttcagtgtgagagccagtggttgcccagctctggcggggctgtgtgtctgtctgaggcacatgtgtgtccaggggccgagccagggcagaacaaccttcacgtgacatggagacatctcacttctcttgtctgcacagcctgcgtcccgcacaaagcctcgtgaagctgaaccccatgggcctccgaggacccctccgtcaaaccccttgcgcccaggaacagaagccaacactgaaaggtgacattggggggtagggagaggacacgcaggaggaatcaggggcttcctgtctcgaggctgggggacacaacacatccgtctctcccagtgggcctcttagtggacggccccccaactttcccctgagacctggaggaaaagggctttcatgaagggtttgtggaacctgacggagtgttctaatggtgggcgggggggggggggggttgctgggagtgggaagtgggacgtgaggcgggggtggcagagccggagctgccccacctttgaggagtctgggtggaggcggcagtcccgggcgtggccctggcccaggcccacagttcgcaggcaggtggcagggtccacgcctccctgctccttcctccccctgcccccgcccccaccatgggtctccctccgtctcagcattggaggctctggagcaaggccgttcccctggctgcaccagctcccctctgctgggctcagatagcggcagctgcacctctgaatcatcggctcatattccccatggctggagaaggccggggccgccgagttgggaggaggggactcgctctccagcctccagggccagatgctccatctgccccatggggcggagccaccccacacccctgggtttggtgctgccagccgggtccaggccctctcttggccctggagagatgggcacagagggcagtctcccctcgatgcacccttatctgtgaggacagtccccccagcccctgtgcctccatccgggttccatcagcaaagggaagtcctggagctggggcccggccttgaggcagagctggaagctgctacgcggaggggcctcagcccatggtggtggggagggcaccccagccacccttggtcccagctgccacctgtgcactccctgagcagagatgcctgactcaccctaacgttgtccgggctgcagatggcggcggctgctgagggagctccttcccctcctcccgcccaccctgctagggctaggccacagatacacagggcgagtgggagtgtctaggggagaagattttatttcacaaggtgaggaacccaggctggtggccgacgcccacacaccaggctccgggacgcatggggtctgcacgtggagagggtgctggccgccccagcaggaagcccgacgtaggtcccagcgtgtctgtcagtcatgctgctgccctgtggggctggagaggcaggacgtgcacccagcctgtggctggcggggcaggggacctgcaggtcaggccaagcagagtggctccggctatgcccccgagcctgcaggctacgccacggtctggcggctgaagagctcgagggtgagcgagctgaggaaggcagggatgctgtcctggcgccgcaggtgcacctcgatgagctcgcccacggtgtgtgagaactctgtctccagtagctgcatcttggaacccgaggggctggtggcctgcggggcagtcaagaaagagacaagacagcggtcagcccgacaggcctctccctctcccctccctccctacacagcccctccagccatgggggcttccctcagtctgaggacctggacaggggtagatgcgtcctcaaccctgccaggccttattccaggtcacctaaagggactgaattaacccagggcaaggtctctgttgtctacactgtcatctacccaggcagttgggggtcccaggcactgtggggtgtgcccacccaaggggctgccaccttgctccttcctccacctggggggctccagcacctgtgccaggccctagtgccactcttcactgaggctggaggaccccacgccctgggcaagtcctgcaacgccttccacactgcctgggccccatgacctagtttccccacttgtgcaggggggcgctgggggcccagggggagtctggctctgtggattctgcagcccagagggcggcctcctgtaactggagaacgggcaaggaggagcttccagacagcgctgcaggccccaggggacacagggcaggagtcacacagcaggtctgagcaagctgctgtgccacggtcctgggctgtgtggggagtggacagaggcccttctgagctgcccccgagagccagccccaccccggtcagcacccacacagccccaggtcaggcaggacacaaacccggcccaccacaaagctccctctgaaaccacgtccctgaaaagtcctgtacccagaatatgcccagaactcccacaactccaccatgaagaggaaagagccaattaaacaaggggcccttgaacatttctccagagaagagccacacacggccaatgagctcatgccaggacgctgggcaccggggaaacgtgaaccgcaactgagcgagacacggagccgcctcgcgccgacggccactgagagcaaccaccatgagctgctgggtcgaggggaatcagaccctccgcgtcgctggcgggagcgtgtgtggtgcggccactgcaaacagccggcagctcctcaaagagctggacgcagagtccatgggcccagcacccgcccgggcgcgcagccagggggtctgagcgcagtccacgcacagacctcggcacgggtgtccacggcaacacgatcccatcaccaacagatggaacgcggaaccagccctcaaccgccggagggagacacaaaaccgggtttacccgtcaacaccgcttcgtacagccgaactctgatacacgctgccacgcgggcaaaccccgaaaacacgcccagccagtcacagagacctgtcgacacaactccgtgcccaggggatgtcctggaggggcacgtcagggctcagggccagtggaaatgtgccacggttagactggtcgcggctgcgcactgaatgtgccgggaggaacggaacggtagactaatggagcgctagacgtgagggtgagctgcatgtgtgtgcatcggagctcaggaaaccgttttggaaagcgctccctccgcccggcagccctctgggaaccctccccaggagccacagggcggcctggctccatccagcttggtcctggcagctcccctgtccaccggagcatgcctgggctgggccccgccctgatggtgtcgcccctcccctcaccacctttggagcacgtgctgccccagaggccctgcgacctgacctgttcctgcacctcctgtttctcaggagccgtccccgtgccctccccctgccctccccctgtttctgctgccttagtacatttggccttgtcatagttcaacacaaaccatttttaaacaaaaacaagagaaaccactctgacctttcgctgagaaaatcctttcacttctgccttctgctcttgattctgaatttctccccctaaatgtcagaggggctgattctcctgcagctgccgggcaggggtggggaggcagtgtgggaagaagtctcctcagccggcccttcgccctcctcccaacccagggctggcaacctggctgggcctgacgcactgtggtgcagactctggccaggctggaccagagaatagctgttttccaggcacccgccttccccggccctcagaggctggcaggctttgggagcctggccgttcatttctaaaaatatttttttttagagacgagtctcactctgtcacccaggctggagtgcagtggcatgataacgggtcactcagcctcgagctcccggactcaagtgatccacctcagcctcctgagcagttggaatgacaggcatgtgccagcacacctggctaatttttaaatttttttgagagatagatagactttagctattttgcccaggctggtctcaaactcctggcctggctggtctcaaactcctggcctgacgtgatcctcctgcctcagctgcccacgacgtgaggattacaggcgtgagctctgatcattctttatttgaaacaggtgcaccccgccagcgtcagcaagacagctgctcccaatggtaggccgggcaacccactcacggctcctacagcacctcctctctgccggcctcaggcggctctggaagaatgatgccctaatataccgcgctgccctccaggtgggggtgggggtggacggagacaggcaggagtaaccagtgctactctcccagctcaaaccccacacgaaggcagacccagcgtttgcaaaacaccagcccccggtgaacaagtcgacctgctgtgcagcccacctctgactccgtttcccccagcgtacccagccacattgggaggctccacctcggtctaacgctccggcattagcaggacctgctgaatgagtggcgccgggcccatccatctctgccatcgctgctcagccctctgccatgttcaaatatcacacagtccccaggtacctcgtaaatcactgtaattacgggctgctcacttaaaattaaactgcaattttttaaaaagcaaattgccagtaagacacgttggctgtggctggaaatacttctgaggctgcctgcgcgcaggctctggcttcctctccctctgcctggccggcccgagctgccacctgtctagtctgcgcacatagcggccctgtggctggcgggcgccctgggggagactgagacactcactcttaatgaagacactcgcggcgtccattgtggccactgcactctagtccagaccctcgctggcctggcctggggctcacctgcccctctggaagcagagagggcctgccctggagggccggggacctctgcagcatgtccgtggaacacgtgggccagggattgtgtgcccggcccccattccagctctgccacgtgagcagtgctcactcggtgcctagggctgactagtcttactaagcgctggtcccaccatcccctgagccgagccccatggtgtcccagcgggcacggacaagaggcacggagtgagggaggggtgggggctgacaaagggcttggagagcagagacagcgcacaccaccaactctctccacacaccactttctccacacaccaccaaccgcaggatgtggtggggctcggaggccaagggggaagtgtgagggattcctgtcaagaacaagaccccctgctgctgagggtccaagagaaactccatgaactgggaaactcgaggggaggaagctagagatggaatgaaggaagccctgaatcctggctcaaacaaggaaagctgaaataatgcagtaaaatgagaagacacgcaggaaatggaaacgatgctacttcgagatactgggaagttatgtgaatgctgttcatctgtggggtggcgtgaagaggtggaggccacaccagtggacatcaaaaccagaaaccagtcagagaaagacaacaggaaaactgtaagtgcctggaaattaaacagcacacttctaagtaatccacgagtcaaatgggatgcctcgaaggaaataaaaaagagaacagaatggaaacaagaatacagcataatgaaatttgccagacgcacccaaggcagtgcttagagggaaacggacagcactcaatgcctgtatcaggaaaggagaaagatctcaaatcgcttctctaaattcctacttcaagaaacgaagggaaaaacaagcccgaagcaggaggaggaaataatacaagtaggaatgaacaggaaaacaaaagttattaaaaccaaaaactgcttctttaaaaaatagcaataaggccggccaggagcagggctcacacctgtaatctttgcactttgggaggccaaggtgagaggatcacttgagccctggagtttgagaccagcctggacaacacagtgagaccccatccctataatcaatcagccaggtgtggtggcatacacctgtagccccaggtatgtgggatcacgtgggcctaggagtttgaggctgtagtgagctatgatcacaccactgcactccagcctgggcaacagagtgaaaccctgtctcaaaaatttgttagaaagaccagcaacgataaattgataaacccctggcaaaactgacaaagattaaaaagggggaacgcctgtaatcccagcactttgggaggccgaggtgggcggatcacgaggtcaggagatcaagaccatcctggctaacacagtgaaaccccatctctactaaaaatacaaaaaattagccgggtgtggtggcgggtgcctgtagtcccagctccttgggaggctgaggcaggagaatggcatgaacccaggaggcggagcttgcagtgagccgagatcgtgccactgcactccagcctgagcaacacagcgagactccatctcaaaaaaaaaaaaaggggggggggagagtgaaatgaccaatatcagaaatgaaatggaaatattataatagatccagaagctattaaaataacaataaaaaatactacaacaaaacttgatgctcataacaaactggatggattcctcgaaaaccacatactaccaaaacgtgccaagataaaatagcctcggtagtcctataaccattaaataaatcaagtttgttctaattaaaatgctactcaaaatctccagtcccagatggtttcactagaaagttttaccgaacattaaatatgaattaataccaattttacacaatcctttttcagttaacaaaagacagagaaacacctttccactatgaaccctgtactgaaaccaacaaggatggtgcgcacacaaagaaaaataagtatcagtctctcatgagcttagctgcaaaaatactcaacaaggactaacaaatggaatccagcaacacacgaaaaagagtatcacaccctgaccaagtgggattcagtttaggtgtacaacgacggctagttcaaatttgaaaatcaatcaatgttatccaccctatcaacaggctaaaggaagacaatgatatgatcctattggcacaggcaaagcatttgaaaaaatttaatctccattcctgacaagaactcttgcaaagcaggaatcaagggaaagtcctccgacttggtaaaaagcaccacgaagaaccctcagctcacgctgcttcacggaagagtctggccgccttccctcattcggtcagcggagagctggctttccccactcatcctcaacccagcatgggagctcctcacgccagggcatgcaggtaagaaaaggaaagcagcagcatagggattggaaaagaacagaactgtccctactcggaaatcacatgacggcacacgtggaaaaccctaagcaatctgcagaaaactcctagaatgacgtgacggcccacgtggaaaatcctgagcaatctgcagaaaactcctggaacactaagtgagtccacgaaggttgcaggaaataagatgaacatacaaaaattaaccacatttctataaagcaattgcaaacaagtgaaaaacaaaattaaaaggcaatataatttacagaacatcttaaatactcgggtatacatctaacaaaaacttgtatagtgtctgtttgcagaaagttaggaaatactgatgaaaggaatcgaaaggaataaaaagaatgtttgtataaatagatacaatgtttatgaactggaagacttatagtaaatcaatttttccaaaattgatctttggttttaaggtaattgctgtccaaacctcagcatatatatatatattttttttttttttttggaaagagggtcttattctgtcacccaggctggagtgcagtggtgtggtcttggctcactgcagcctcaggcaatcttcctgcctcaacgtgccaagtagctgtaactacaggtgcgcaccaccactcatggctgtatttttttcatagagatggggtctccctgtgttgcccaggctggtctcccaactcctgggctcaagcgatccttttgccttggcttccccaagtgttgggattacaggcgtgagccaccatgcccggccagcattttttttttttttttttggtagagagacacaagattattctaaaatgtatatagaaagcaattccaaaaaagaagagtagaggaattgcccttcctgatgttgagaaccgtacagctacagcacagcgttatacggctcctacgtcagacagacatggctggggcagcgctggaggggagatgtggagaccagcagaacagaacagaggaactcgaaagagacccacagacgcgtccaggccactttctaacagagaatattatgccgtgaccaagtgggacttcgtttaggtgtacgaggctagcttggtatttgaaaatcaatcaatgtaatctgctatatcaacaggctaaagaataaacaacatatgaccctattaatcgatacggaaaagtcacagaaaagtcacaaaggcgcttcagtggaggaagggcagccttgtctttgctacagctggagccggaggagctggacacacttagttaaaaaaaaatttttttgaccgaaacctcacatctcaaataaaatttaactcaaactgtatcacgaacttacatgtaaaacacagaattatgttaaaaaagaaatcttcaggatctggatgaggcagagctctgacactcaacaccaaagcacaatccacagaataaaattaaaatggataaatgggcctcgccaaaattttaggaaattgcacagtggaagagcctgtgaagcagatacaaggataagctacacgacagggcgccagcgtctccctgcccatctctcctagaacgccacggccacaggggaccctggcacctggaggggtgactgcagcgtcttaaccccaagtgggattcctgcctgtgccctggccccacagggcaaggcccacatctgtcttgcttctctcttttcccagaacagacctcaccaggctggagagtggcctgggcacagaggccgggcctgtggcatcagcggccatcgtgagggcagagcgcccaggcattctcagacacacccctgctcccactggccttcctgggagaagcacccccttgttccagatgagaagccgcagctgctgggccgggggaggcatgaatatttcatgcttggatctgcaagcgccacgcacctaactggacacagctccaggcgcctgcttccctgaagcccaatcctcctgtcattggtgtgctgcaagcgccgctccggagcagggctctgtgtggggagaggaaaggagccctcgggggaagttatgctgggagcccatttgtggggggacggagagcgggaagcaaggtccatgaggatggggtgtcctgcagctgggtcctgaccgggggctgctccctctcctgggcctaggcactgcaggaaaatggcaggtagtcagcctgccaccacctcccggccaccagcacacaccctcaacagaccttccagatagacggctcaatcctgacttgagcactgccggccccaacgcctcccctcttacaccacctgcttgtgcgggcctggtggcagagctgccgacatcgggggctttcgcacccaccagaactagcttctaacctcggcttggccaccaggaagctgcgtgaccctgggcacaccgacacacctctcttgagcctggtctgcacgctgggcattgccgagaagactaacgaagtcaggtgcgtaaaatcaccgggctcaggggagacacagagcacagtgggatgaggaaaccctgtgcccacgttaccccgggccatgaggacagcagctgccccgtgccctggcgccatcggatggcctctactgggaagtgagctgctcccggccttgtccccacctcgctgcagcaggactggttgtctgccaggccccggagcccccaggcttcccacagaggctcccccaccaggacccgcgggagaggagaggggcgtgcctggatggcatctgccggggcagccataggtccctgtgaacctcgcttgtagaatacacctgctctcaaagccagcgaaggggagatttttttttgtcttgaggctgtcaggaaatcaaagtgttttcaacttcaaaagactctccgggcgtctcaagttgagaatctgacgcgtcccaggcactttcatgcacacatggggcgagccggggagaagactcagcagcgtccgccgagagtcagccctgaacttcaggggtgagaaaacccttcaagttcacactgcagcacgacacacactctcacacccacactcacagagtgcaaaaggactcttagaaaatcaaaatgttaatggcggttaactcggagtgctgggacggaaagtgactcatggttctctgcattttccagatttttttatatgctgcatatttgtaattaggaaaaatgtatatctaaattatatctgcaagagcggaacagcttcaagacaggccgctgagcacacgggttccccactgcggacacatgcaagccccaatccttatccacctggcctgcaaccctcgggcgtcttgctcatctgcccgtctgcctggagtgtctccagacactctgtgggaggcccctctgtgggctgctgaggccggtgctgcccacccacctgccccagatgtcctgggcctggggtgccaggctggcgtcatggctggcatcttggctggtggcaccacagacgccaggcgtgggtcacagcgtgagcccagccagctggttggggtgggtggcgctggtcaggtggccacagcagagtccgctgaggctacctgtcatagggctgctgctgaggtgtgagagacacgggcccaagcccctcggcacccagcggccagggcacccaggttgggcttgtgcaaatcccaggtggggcacagctctgtccacgggtctttgcggtgcccgtctgagcgcctgtgaacagtgctgggcagtctcaccatgcacacagctctgcacgagcctccacggccagggctgccctcccttccctaaaacgtctcaggggctgaaggccttggaccatggcatcagggtccagaggtgataaacctgggtaatgtgtgctctcatcccagcaggtgctgctgggggttagaggtcagcacagtcccagccccggggttggaggtcagcatagtcccagccctgggatgagcacagtcccagccccagggttggcggtcggcacagtcccagccccaggcggggttggaggccagcacggtcccagccccagggttggaggtcggcgcggccccagcttggcttcatgacctcggcagcagtgatctgtatcccaaagttcaggcgtgataacgtcaagaccgtgctgagcctgccgggtacagcgtgaaaatggctggtgctaccgtggtctacgcaacctgttagaccgggataccgaggactcctggcagcctcacaactcacagctgggctctgcacaggagtctcaggtgctgtggggccagcctgcctgctgcacatccacggcccgaaggtgatccaggagcagcagccaccaccgagccctgacagtcactgcctggcccgtccgcgctctgaggagggagagagcaagcttctcgctgctggtgtattacctcggccgagggcctcctcctccaggctggccacaggacttgttacagcctatgcctgactcccccgctcatggcctcactccctcatggatgcccatggccggcccagccccaccctgcacaagccctccagctccaggcccagcccagctcagctccgcggagctcctggtccagaggtccaggtttgaccccaggacaccctgctgtgtgcacgaccctcagctcccacccctctctgccccactgtccctccggcgtccctcgggggagacgacacagccgggcccaaaagaggcctcgcagatgctgccgcgtgagcaccgcgctgagggcctggcggcaactgggtcaggacagcttggacagaacgccgagaacaaatgtcccggcatgaagttccaaagaacggaagctggcaaaaagtgtgtccggcacggggaaaatagctcagccaattattcctgcctaattgtaccgaggaaagcatctaaatactgcctgtgctaattataccagcgttattggggtttatcttcccggcgagggtgacctttccttcaagagtgactggcggggcgggcaaggccaggcaccccagcagtcgcagaaaaatcccaaaccaacaattattattattattattctatttatacagctccccctcgcacacgggcgttctgctttacagccacacgcagctgctcctgcagccgcagccggaggggagccgagggagtgggggcgccggctcggggtggggcggcctgcgcagcccctgctgtgagtggcatccgccacgggcggctccaagggccgtggaagggcatggaggccacagggatgagttagaggaggtggcggggatggagaaggtgggagaaggggctgagtgtgggttaaaagacagggactggccccgagggcagcaggagcacagaacacaatgaaggttaagggaagaaaggggacgcagcgggcagggaggacaggtgctcagatcaggcacacgggtgaggagggaggagctgcagcacagccctcgcccagtggctccctgagccccgcccaggtgtggggtcctcccctcctgagcccgtcgcgggtgtggggtcctcccctcctgagcccgtcgcgggtgtgggggcctcccctcctgagcccgtcccgggtgtggggtcctcccctcctgagcccgtcccgggtgtgggggcctcccctcctgagcccgtcccgggtgtggcatcctcccctcctgagcccgtcccgggtgtggggtcctcccctcctgagccccgcccgggtgtgggggcctcccctcctgagcccggcccgggtgtgggggcctcccctcctgagcccgtcccgggtgtgggggcctcccctcctgagccctgcgtggctgtggggtcctcccctcctgagcccgtcccgggtgtggggtcctcccctcctgagcccgtcccgggtgtggggtcctcccctcctgggcccgggctagacagcaccaccctttccagatgtagccgaatgagaacaggagaggacgtcagcggcctctgcgccttctcacctcccacccaggcgaggcccatgctgctggcagtgacgtttcgtggagcgccacgcttagggcaatgtgatgctggggatgcggggtgaggagggccggagatgcaggcccgccctcctgtgaggctgcccctcttatgtgctgtgggccccggggcccatcagtttgtctctctgagctgaagtttcctgaatgtaaaatggagacaaaatgcctattttcccacctcagagggcggccggcagcttccggccgagacagagccacaaggacagatgcacctgccatctgaaacagccagaatatgaggcatcaaatgtgaaacaacagttttcagtcaggaagggtggcgggccctgagagacggggcgagcctggggagacagtcacagcccaggcagggcctcgcgggacccgagttgagggacagggctggagctggagccagggcgccgaaaagagtgccacagaggagggctgagttcgctggagtgctcagtgagaggctgagaaaacctggagcattagagagaaaaacccagaaaatggcacccgaagctcacactgggctggaccagtgcctgtctccggcagcctcgcgggaaagcctgcgaactaggcggctccagggcacagcactgagatggacaccccgcagcaaggggcggtgtgagccccagacagacgctgccctgctcccacctcacatttcctaaaccgagacccagagaaccaggctgtttccaagtacctgaactgtgtctccgaacagagctcacgaatatttataggaacacacacacacgtgcatgcacaggcacacgcacacatgcacacacagcctcgcagcactcaacaaagagaaaatcagctgagtgaaacagacctagggctgacctgacgtcagaagcggcagatcacattaagtcactgtaactttgctccatatgcccaaaaaattgaggatagacataaaagggacaaaaaagagccaaattgaccttctaaggatgaagacaacaagtacgggggacggatccatgccagatcagacatggcgaaaacaggatcagtgaagctgcagatacaaccacggaaaccgtccgagatgaaacagatgagaaaaagaaagaaaagcgcatacaaacaaaaaggaaaaaacggaaagacagacataaaggaggcagcacattgggcgtgggctgtggggcgacgtcacatggcctgacacgtagggcaggagtcctggaggcaggctggtggcacttctgaaatggctcctgatggtccccacctccaggcaccacccgcatcagcgccagcccttcagcgtgacttacagcggatgcaaagtggggcgcaagtgctggcttcccctctgcagtcacgtcacagcagccgtgacttctgcggctcccaccctggttctcagagctctgacccgccagctgccatgcgtgagcggcccacacggcgaggagctgccataggaccaagcgcggcagcccaaccacggatagaagcagaatccttccgacggccacatgggtgtacctggacgtgggaccttccccagcagagccaagaggactgtggctggtgaggtctctgagcagagagccagctcagccacacttggattcctgaccccagaagccacgagccagtgagttctgcagcgatgttattcaaggactggttgccagtggtggggacagcaaagagtcttgaaaaagtagtggccccaattttctgaaatgtgtggaaaagtgtaaactgagagatctgagaagttcaaagaaccccaaccaccaaaaaaaaaaaaaaaggcagggggaggaaacaacattaaagtacacaaagtacatcataatcaaactgctcaaaaccagtagtacagatgaaatcttaaaagcagtcagaggaagaaatgacaactgaccgacagaggaacaaagatgagaatgacagcagacttctcagaggaaatactggaattaagaagacagtgagatcacctctgtaaagtacagaaagacaaagcccagaattctccacccagtggaaatatctccccccaaataaagacttcttcaggtgtgcaagagcttaaaatatcccaaaaagcagctgattcacactgcaagaatattaaaggaagcccttcagacagaaggaaaatgaggatgcaaacaggggcttacacaacaggccaggccggtggctcacgcctgtaatcccagcactgtgggaggccgaggtgggaggatcacctgaggtcaggagttcaagaccagcctggccaacatggtgaaaccctgtttctactaaaaatacaaaaattggccacgtgcagtggcacatccctgtaatcccagctactcgggaggctgaggcaggagaatcgctttaacctgggaggcggaggttgcagtgagccgagatcgtgccactgcactccagcctgggcgacagagtgagactctgtctcaaaaaaaataaataaaaataaaaacaaacatgggcctacacaagaagaaggaagaacagctctactccttccatgaatgaggggtgggagctgcatgggcagacatatacaacatttacaattattatttacatctctttcaaagatagctgactaaacagaaataaaaacaaagtattgtggggtttatcatgtgcataaataaaatatattataagcagatgactaaggcaggaaggagaagactggaagtatgtgactgtcaggttctcacactacacataaggcggtgtcgtatcattcgaggatgactgttaaagatctacgtgccctaaatcctaacacaacctgtaaaaaatacagttaacaaatcaaaaaaggaggcacatgaacttgtaaaaaattcaatccaagaaaggcagaaaaagagggaagaaaaaagaacaaaggacagacaggacaaacagaaaacaaataacaagatgatagacttatctaatcaaagtagtaatcaatttaaatgtaaatggcccagtgaaaaggcagagaatgtcagattctatgcatatttaagactcagctatatcctgcttttaagaagcacattttaactatgaagacgcagtagattaaaagtaacgtgaagcagatacagcgtgctcacagaagccaattcgccctgtgttcacatgagcacacctcgcttcatccgtggcctgactgtgcctcacagacactgcattttttacaagtttaaggtctgtgtctggcaagtctattggcactatttttccaaaagcgtggattcacttcatgtctgtgtcgtatatatttccaactttttcattactagtatatcttttatggtactctgtcatctgtgatctttgatgtcaccattgtaatggtttcggagctccacaaacagtgcccataagagagcaaacttaactgataaatgtgtgtgttctgactgctccactgaccagccatcccccatctctctccttctccttaggcctccccatttcctgagacacgaccgtcacaacaatattgaaaccaggcccattaataaccctagaatggcttctaggtgttcaagtgaaagaagactcacatgtctctcactttaaatcaaaagctagagataattaggtttagtgaggaaggcatgttgaaaactgaggccaaaagctaggtctcttgcaccacacagctagcctgcaaaggagaagttcgtaaaggaaatcacaagggctattccaacgaacacatgaatgataagaaagcagaacaggcttactgctaatatggagacggtaaatgagctcttggggcccttaagaatgatgctaagtcttctctgtctgtgctctatcagtggaacaacaaagcctggatgacagcacatctgttcaaacgtagcacagtgcactgaatattttaagcccactgttgagacctcctgctcagaaaacaaaattcctttcaaaatattattgctcactgacaatgcaactagttactgggctctgatggagatgaacgttgtttctatgactgctaacacagcatccatcctgtggcccctagatcaagggacaattgactttcaagtgttattatttaagaaatacattttctaaggctatagttgtcacagagtgcttcctctaatgaatctgggcaaagtcaactgaaaaccttctggaaaggagctgtcattctagatgccattaagaacatcagtgatttatgagaggaggtcaaagtatcaccattaacaggagtttgcagaagttggttccaaccctcatggatgacttggttcaagaagaggtcagtggaggaagatggacagatgtggtgaaaatagcaagagaattagaattagaagcagagcctgaagatgtgactaaactgctgcaatctcatgatcaagcttgaatggatgaggagctgctgcttatgaatgaacaaagaaagtggtttcttgagatggaatctgctcctggtgaaaatgctgtgaacattgttgaaaaatgacagcaaagtacatcaacttagttgataaagcagtttgaggggttgagaggcttggctccaagatagaaagaagttctactgtaggtaaaatggttttagagagcattgcatgctacagagaaatctttcatgaaaggaagagtcaatcaatgtggccagcttcattgctgtgtttttttttttttggcggggggggggggggtggggatggagtcgtgctctgttgcccaggctggagtgcagtgatgtgatctcagctcactgcaacctccacctcccaggttcaagcgattttcatgcctcagcctcccaagtagctgggattacaggtacgtgccaccatgcccggctaatttttgtgtttgtagtagagacagggtttcaccatgttggccaggctggtctcgaactactggcctcaagtgatccacttgcctcagcctcccaaagtgctgggattacaggcttgagccacagcacccagcccactggtgtttttaagaaactgtcacagccaccccaaccttcagcaaccaccaccctgatctgtcagcagccatcaccatcaaagcaagaacctccaccagcaaagagattacaactggctaaaggttcgggtgatcattagcatttttaagcaataaagtatttttaaaatcagaacatgtacattgttttttaaagacataatgctattgtacacttgacagactatagcataggataaacataacttttatatgcactgggaaacaaaatgcatggcacttgctttattgtgatattggtttaatcacagtgatctggaaccaaatgcgtgatatacccaaggttgcttactgacagtgcaactctgtatcaaacaaagcagatttcagagcaaagaatattactagcaataaaggtcatttcataatgataaaagcgtccatttatatatgaaacaaaaactggaatgcaagaaggaatagagaaatctgtaataatagtcagagatgtcaatattcatctatcaataactgatagaacaggaagacagaaaattggcaaggatataaaagcttcgcaaacattattaaaaatgtcagctacttgacatcgatatagcacattccagcaggatacaggatacacacagatttcaagtacacacacaacatttaccaaggcagtaacattctggatggaccttaaaacaaatttcaagaaatgtgaccagatgcagtggctcacgcctgtaatcccagcactttgggaggccgaggcaggtggatcacctgagatcaggagttcgagaccagcctggccaacatggtgaaaccccctctctactaaaaatacaaaaattagccaggcgtggtggcacgtgcctgtaatcccagttactcgggaggctgaggtaggaggcaggagaatcacttgaacctggaaggcagaggttgcagtgagctgagattgcgccatgcactccagcctgggtgacagaatgagactccgtctccaaaaaaagtagaaggatttagaccgttccgagaatgttctctgacaataatgaaattaaatgagaaattagtaacagaacggcatctggagattttcaaaaaatgtggaaactaacacacttctaaataacccatacgtcaaagaagaaatcaaaagggaggttagttaagtcatttgaactgaatgaagataaaaacaaaatatcagaatttgtgggatgccactagagcagaaactagggggaaacttatagcactgaatgtccacattaaaaaaaagaaggtctcaaatcagagacttcagcttcgaccttaaggaactaaagaagggcaaattagacaaagtaagcagaagaaagaaaataaagatcaaagcaacaatggtgaaagaaaacaaaaaagcagtagaaataataaaacccaaagctgtttctagccagactgacctggaataaaagagaagagacaaattattaacatcaggaagaagagggatgatagcactacagatcctacagatgttaaaaggatagtaagagaaattatgaacaactttatgccaatacctttgaaaacagataaaatggacaaacttctgaagatacaaactactaaagctcaccacaaaagaaaaagacaatgtgaataactctatgtctatcaagacaccgatgtgtagttaaaacctcaggaagaaaacttcaaggttcaatgggtttaccgatgaattggatcaactatttaaaaaagaaataatatcaattctacattaactcttttcttccagtttgttttaatcaagaattctacatgaactctttaagaaaactgaagaggaggaatgctttccaactcactctgtgagaccaacattactatgatatacaaatcagaagacattacaagccgcacccccccaaaactatggaacaaccctaaggaatatttatgcaaaaattcaaaacaaaacggttagcaattcacatccaataacatataaaaaaagataatgtagtatgactaagtggggtttatcctaagaatacaaggttggtttaaccctagaaaatcaaagtaattccacatattaacaaagtacaaaaggaaaaccatatgatcaactcaataaatgcagaaaaagcatctgatcaaacccaacaggcattcctcaaaaaaaaaaaaaaaatctcagcaaactaggattagaagagaacttcctcagcctgagaaagggtatctatgaatgacgtacagagaataccacacttaatggctgaagattggatgcttctccctcagatctgaaacaggacaaggatgttcactctcactgcttgtattcagcatcatcctgaaggttccagctagtgaaataacacaagaacaaggaacttcacaagcatccagtgtgggcaagtggaagtgcaagtgtacttacagataatatcattgtctaaggagaaaatcccatcagatatactaagaagctactggaactaacacatgagtttagcgaagttgcaaaataaaaagatcaatatacaaatgaattgtttttatatagtagcaacagaaattaaatgtaaaaacaaaactcttttataataatatcaaaatctaaaatacttgggataaatctgaaaaagatgtgaaatacctatgttatcaggaaggggtctcaatctagaccccaaaagagggttcttggatctcacacaagaaagaatttgaggtgagtccatacagtgaagtgaaagcaagtttattaggaaagtaaagaaacagaagaatggctactccataggcagagcagtgacgtgggctgctcgactaacacttatactgtatttcttgattatatgctaatgaaggggtggattattcatgagttttccgggaaaggggtaggcaattcccagaactgagggttcttcccccttttagaccatataggggaaattcctgacattgccatggcatttgtaagctgtcatggcactggtgggagtgtcgtgtcatatgctaatgcattataattacagtataatgagcagtgaggatgaccagaggtcactttcttttttctttttttaagacggagtctcactctgccgcccaggctggagtgcagtggcgcaatctcagctcaccacaacctccgcctcctgggttcaagcaattctcctgcctcagcctcctgagtagctgggattacaggcatgcaccaccgtgcccggctaatttttgtatttttagtagagatggggttttaccatgttggtcaggctgttcttgaactcctgatctcatgatctgcctgcctcagcctcccaaagtgctgggattacaggcatgagccaccgtgcctggctgaccagaggtcattttcatggctgtcttggttttggtgggtttggggtcagcttctttactgcaacctgttttatcagccaagtctttgtgacttgcatcttgtgcggacctcctatctctcatcttgtgactacgaacgcctaaccttctgggaaagcagccctgtaggtctcagtcttatttcacccagtccttattcaaaatggagtcactctggttcaaatgcctctgatacccgcacactgaaaatgagaacacattgctgagagaaactgttcatagattagaagtttccatattgttaagatgtcaattatccccaaaatgatctatagagtcagcgtaattccaattaaaatcctagcaggctgacaaagatgcaaaaggctattcagtaaaaaagaatgatcttgatgctggagtaactggacgttcatatgcaataaaaaatgaaaaagagtcaatccagaccttgcaccatataaaaaaaaactcaaaatggatcatgaacacaaatgtaaaatttagaactataaaacttctagaagaaaaaaaaatggaggcagtctttgtgaccttgggttaggtaaagatttcttagatacgacagcaaaagcacactccataaaataaaagacgggtaagttagacttaatcaaaattagaaatgtctgctcttcaaaagacattgttaagagaatgaaaagacatgtcatatataaggagagaacaccagcaatgtacatatttgatgaaggatttgcatctggagtatacaaagaactctcaaaactcattaaggaaacatagaaccccataaataattagcagaagatgtgaacaggcacttcagcgaagaccagcaagatggcacagggacagatgctcagtgtcattcgtcatgaggaaaatgcaaattaaaaccgcaatgagacgccgtcagtcacctcttagaaggactgaaattaaaaagactgatcatgtcaagtactggtgaccgtgtgcagaaactacaagtctcctatactgctgataggaatggaaaatggtgcaggcactttggaaaacagcttggcaacttcttgtaaagttaggcgtacactgaccacacaatcaagcagttccgatttagccaagagaaaagaaataaatgtccgtgcaaagcttgcatgtgaatgttcactgtacactttatttgcaacagccccaagctggaagccaccggaatgcccgtcaacatctggatggatgaagacattgtggtctatccgtatgactgtaaagggataaactgttgataccatagcaacacggataaatctcaaactaactacgcttagtagaagcagccagatgagaaaggctagatactgcgtgatgccacttacagaaactctggaaaacgtggatgaacccgtggtgacaggaaacacagaaggatcagtggctgcctggggtcgggttgcagtgggaggggcaaggcaggctgcacagggcctgggatctgggggcgaagggtcttgccttgatggcctcacgggtgcgtgtatacagatggtagctcatcaataacgcagactcagcaaacagggaagccctggcaggaggaggtggtggcatcgggggcaggtccagctgtcacaggccagcctggtgaaacacggcagcgtgctgcttctccagacaaaactgctccctcttgggtgtctagaggtgattcccgcgtagctctgcctggactgggaaacatattcctaaccccgtgcaggggctgcagtccctctacccgaaacccacgccaacacccacttcacattttgcatttgaatctcaggaggttcacggaccctctaacccagcggcacccgcagcccctgggatggaaaagcatcataaaagcagacagtggcgcgtgctggggaggacggggagaagctgggagaacaggcagctccttacaaagctcaaagttaaattaccatgtgaccctggcacttccgcttatgggtgtacacccaagagaaacaaaaatgcatttccacacacaagcttgtacacgaatgttcacagcagcactgtgtgtaatagccccaaacggaagcaattcaaatgttctatcaacggatgaacggataaacaaccatggtctatccacacactagaccgtatgattcatcagtaacaaatggagcgtcagcacgtggtccaatgtgagcgaaccgtgaaaaccttacgctcagcgaaagatgccagatgccagagaccactcgccgctgagcccatctccctgcaacactgcaggtagcggagtctagagacaacacagacagcggctgccgacggctgggactgggagaggatggctatggggcacgtttccttccagggtgataaaggcattcattccaagatagactgtgatgatggctgcacgctctgtagatgacatctcaatcaagctgcttcatgagaaaggcccagccactgaccacggggtgaacgtcctgccatccacagtccctggccgagaagaaggtatgactgacaggtaagactacctaaggttccaggcacaccctggggcggggaggaggctggggacaaggacagagtgtgcaaagacacgccgggctctgggaggtcagcagagagtctggaccccagatttgaggcagccaggaactgcctgccagtcccagctcatatggcctgagcttggccaaccgcggcgggtcccactcgcagatggccagctgcctccgtgccctggggcagggatgtcctgttcctgctctttagagcaacagggaggccctccctaacagactcctcagtcatttaggttgggggcaaaaggggctggccgcagcttcgtgtaggtggagcagggcttggtgggagggcggggctaggtgggcttgcccggggtcgaggtggtggtcaccgtctagtccccacccaggacagacactcggggtcccagggagggctctgcctcctgcctggcaggaaagcgtcctgccccctgcctggcaggaaagcgtcctgccccctgcctggcaggaaagcatcctgcccacccggtgccatggcctggggagtgcttggctctcaggccagctgcccgcaggacaagctgggcctggggcggggaaccagcctgttcgcttccgagtggggctgacaaacccccagcctcttcacaaaggctccaaaaacagaatgtcgtggagaactggacgcagatccacagggccatagagagcatttccggcttagtcaaaggagtaactttctaacagtttaaacgcgcgagatgggatgtgcaggcttgggaggcagtggaccagataaaaccattggccagaagatacagaagggctctaggctgcccaggcccttcagttagaacatcccccccgcctccccccggctcccagggcaatgtcagagaccatctggatggaggatggggctggtcctggcttctcacagcttgggaggtggggcagctgggcaccaggtcagcaagccacaggtccacccacggccagggcccaggctccccgcctccccccataaccacctaggcatggagcacagaccctgcctggccatcggccccccaatccctgctggaagacgtgcccaggcggagcaggacccccgcattactgctgcgcatccagcacctgcagcggggcccagcacggcgggcattccacatgggcgagggccagacgagtgagccacaccccaccctttcctcaaccatcccccatgaggacgacatcagagtcatcccccaagcccaggtctgacactctctttccccaactttggcctggagcccgaggcctacccctctgctctccctgcacgctggatgccctggagccggtgagcgtgagcaagtgagatcctgaggccagaaacatctccccaacccagccagacaaactctaattcacccgtgagccccagctccaggccacctcctccaggcagccttccttgactgcagtgcgccccggggtatctgggagacgcctctgcacagtctttgaatcgggctgtacaagtatctgtcctagcagcagcagagccgcgtcataaacagtaaaacaagccaggcgtggtggctcacacctgtaatcccagcactttgggaggccaaggcagatggatcacctgagctcaggagttccagaccagcctggccaacatggcaaaaccccgtctctactaaaaatacaaaaaaagccaggcatggtggcgggcgcctgtaatcccagctactcgggaggctgaggcaggagaatcgcttgagcccgggaggcagaggttgcagtgagccaagatcgcgccactgcactccagcctgggcaacagaatgagactccatctgacaacaaaacaaaacaataaaacagcaacagcagttcagggctcctgcagttcaaggttttagcggcctgggcatgcggtttctctgcctacttggacctgagcagcctccctctgcccaatgtcactgcacactccctgcatgccccagccctgactcgggtgagtggaccgtgcagacggcgagaggccacgcaggccaagccaggatagagcaaaccctggcggggccaggtggtccccgtgcgtttgcagcctggatgtgatgcccaaatctctgggccaggcacagctctccactgccggcggctggtgggattagatgtgaccaaggccgctcccgggccggctctactctgtggggggcaggtgcggctctgggggtcctgttgggcctgagcacgtcccgataacctggctgctgcccactgcccaagcgccagagcacacggccaccaatgagagctgtgcttccctggtcctgggttaaaaatatccccgtaagtgacaagactttgagaatttcgtctctccagtcactcacatggggggcgaggacagctcttggctccgcgtctcgcccggctgcatctgatgcctccctgggctgaagctgcatctcatgaaacagacgagaagtcattcacagcccgacagcacaggcacagaaatttgctgttttataccaagttgagcggcctgtcatctagaagcttctgtcctgacctcctcagcaaagaggaagtcacggaaccggctgctgagcctcctgacctcggcctggcctctcctggcagctgtgggccccaggatgaaagcgggcaccacgtcactcacgagacagaagctgtcgttctcagagcctcccaggtgagtggccgggcgcctgcctgaagctggacgagcccacagtggctgaggccggtggggacccaaggggccagtccggccttcccggaccaccaaggaaggtgggcgctgcttccctcgcggggcagatggtctcggccgtcactctgctgtccccgtcctggctgtgagctcagcctcagtgtccccacctgtgaaatggggagacccccaatccttctgggcgggtgcctcgcttctgccctcgcatgagtctccccttcctgagctgggattccatctctgctgggaatgaggtgctccctggctgagaacccggtagccaggcacaatcacgccgtcaccaccccagccctcagccagaccctgcctgctcgccgcgctcggccgccatcttcctgtggacgccacttaccctccggcgtcaccatccgctgcaaattgccttgtttttcgtctttggcagggctgaaaatttgatcatgaaagggaattttctttttttttcttaattagtacttggtaatatcaccaagctgtgagtttatggctttgtagatcttgtgtgtttgacactaactactcacaaaggcttttaaagctgcatttcaactctgcaactaccatgccggtaattaagccagaggaagcggcgacagatttcacttttcacagacacccttcccacctgtgctcccgctccgtgtggccgcagcccccgtggccctgtggaaacccagcagctccctgcggctccggccctggaggcctgaggtggccttgcctccaggagcccggcctcagccgtcacagccgggcttggccctgcacttaggatccaaagggcaactcttggcagctggaaaggttctcccagtccacaggccgccagaatcccttccggcgcatgcctgcctgagctgccacaatgccgcgtgctcactggccccccaggcctgtcccaggcgagctgagtaactgcagccacctgagccccggcgagggacagacagctatgcttcttcaggtccccgagggaggccttcgtccttcgtccatcgctgggcccatcatttactgagtagctactgcctgcagctgcagaggcctccacctcccactcctcacctgggcccctgcaaggcagccgaggcccagggcacggtcaggctgtgtcctggaggggagggtgggcagggcctctgagtgctgcacagctgcgtcccacatgtcagcccctcgcccagctggccctccctgtggctcagcacacgggctgccttgcggctggttcccggatggggagggtacactgcctggagctcaggggctggctggggtgagtccgaggccgggctccagcacagccttcaagtgaggcccacagtggggctgctggtactgaaatggcatcctggcttcccagtagcacattccttgagtgtgtcagtccctctggggaccatctggaggacgggggctagagagcagccctggtcattctccaccaagaccacacatgaggccccgatggcacagtgccgggatcctgtgtaattagggtctgggtgccctcgttgccctactcctctgaaagcgagccaggttcaccttgaaccctgcagaatgatgctctttctggcgtctttctctgtcttcctgggccttacaggttcttcggcagtaaatcaactaaacggtaacactcttccctccatcttccacattcaggcaaagctggccccggggagctcctgcgcagacgtccctcacggccagggaggccgcaatgaaggctgaacctggggaaggggcccaggtgcggtgtagacctcctctgtcatccagcccctcctgagggggcttgatgggcgtccacaagtgggcagcttttccgcgcttccccgtgtctgactgtgctgagggcctcctgaagtgcaattggttagtcacggtttagtgttctttactgcaatgctattttaagatgcaattaaaacgtctcattgccaaagtgcgtgcttcctcctgggggcctccttcctaacacgaaggagtcagaaaccaaggccgggaggagacctgagctgaagactcacttctggagtgggcacactttgtcccagctccgtcttcctggagcacccaggagagcccgctgcaagaagaagccccacggcaggccacgtggaggcgaattcacctcctacccagacagcgtgggcaatgctgaaacgagcgtgagctccgaatgattttagtgaggttcaaacctcccctcggctgtcagcctctgaatctcttccacttcagccacggccactccatggctaggggcggggaggggacactcagaagtttggtttcttctgaggggcctgagcacacactcaggatgtgagtggggccgggaagggcagcaagtggagcctatgcaggaacacttgtgcaaggctgcacggtttcactaccaccagaaggcaactaaaaatccccacaactccaggtgtgtcctggctggtgtcacggagcctcacacacggctgaaccgcttaactcacatccagccacagaacggcctgccaggggctccccggggacctgacgagggtcaacactttcccacgaccctctgccatccccggtgtgcccttggggagaagtgtggtggtcccacaggcccccctgccaaaacctcatgcttgaggaagcactcccagtggacagggagccccagctgctgctgctggacaggtaggggcccaggggcacaaggggccacctccaggctggggggagacctggggagagacgccggttgggtgctccactgcagaccctgacacgcgaggtgtgggacatggacggcattcgaggtcccaccccgctgaaggagcttgacacggagccctgcagggggcagaggcggcccagggagaggcgcaggcaggggacgcagcttgggacgggcctacagctggcccaggaaggtgctccccgaggctgccacgtgcccagcacctccccttggtgaccatccccccaaagctggggggagtccagggcccagcactcctttctccaggcttcccccaggacatcctgctgtggcttggcacaggccgggcactgacagaggggacccgtctggttgcatccgatccttcgatgctcctgcaggggtggaggggcgcgtgggtacagtcagcagggctgtggccgtaccgtgcaagccactccagcacctgagcgtgtcctcctctgcgagtgggacaggaaagcctgcctcgcacagctgctgccaggacggagacagtatgctgctggtcagtgagtgggcacagccagggtcactgtcccgccatcagaaggaggacaggggtgcggggaggaggggcctgagcccgaggctcctggactcacagtgggcacagggtctgtgcagccaaggccccacctggcgggcgcgggaggcaggccctgactgcagcggggagagcagagcgaaggggtctcctcttccctcctagcaatgctgtgtggctgatacgctgaccagctacttgacacctggcacagcctgctgggctcagggtggggagacgcatgattcctatcttgtctgtagctttcctgaggctgacgcagggcccagcgctccggagggagacttgatcacacacaggcagtgcacagaatgtcaatgtgggagaggccggcggctctgaccttggtgtgttacagcccttgccacctccctccgctgccctgcatggggactcaaaccacaaacagcagctcggaaacaagcagacacgcgtcggactctggttcacggggaagagcgctgtttaggagatggacgtgctccacgcagagacgcgtcgggctctgattcatggggaagagctctgtttaggagatggacgtgctccacgcagacacgcgtccggctctggttcacggggaagagcgctgtttaggagacggacgtgctccacgcagacatgcgtccggctctggttcacggggaagagcgctgtttaggagacggacgtgctccacgcagacacgcgtcccgctctggttcacggggaagagcgctgtttaggagatggacacgctccacgcagacacgcgtcgggttccggctcacggggaggagcgcgctgtttaggagatggacacgctccacaccacctctggcgtcctctctgccctcaggctcttgggcattcagagccaggagctgtttctggggaggcagagatccctccaagccccaggaaaggcctcctgctgcctcggggacaaagctgtgtcaggctcttctctccacgctccccaagggaggggaggtgctcagaaacagaccaagagactcagttggtgccaggatggtgcccgtgaccagggagatgtgcacatgcgttcagcgtcactggggaagggacagccacacaggcagtctcaggctgtagctgaaaccccaggcatttccctaaagcaccagcgtccagaactgaagaagggaccagccccatccggccccagaccacagtggggaaccttccagggccagtctccccctgctgcccttcccgcagggccaggggctggtcagcagcacaggccgcccccggcgctgcagtcctggacgtccatggctgacagctcctgggcctggaacactgccctttcctccagctctgcaaagacacttgaggttccagccaggacacgggacataaagggggtcagccctcacggacagtgtttccatagagggttcaggaggtttataaacaccagcaggatggatgacaccacagccaccacaggagccagcatccaagagaccccgtgagatgccaagggtcactcgtgcccgaggtgccctccggaaccggagactacagataccaggggatgcttgggccaagtgtgtccagccacgaaggttactgcccggccctgggaggtcactgggaccaggagctgcccccacaaggaatgggcggaaggaaagggtgaccgagtgcccggccccgtgcccgtggctcaggaagacatgctgtgtttgcatttctgttgttcccagagcgaggggatgagaagcctgaggccggcccgtccctgctccagacgcccccccaccgctccccctcataggagccaaggaggaggaagtgcttcattctttgcaaagaatactccgcctgatgcaatttgcgtgtgcaagatgtgtgaagtgccttttccatttcatcagcacccgcagcctgtatgaagctgctgtttgctctctgccagctcgtggggcttgaatggtatcacgggaggttcttcatcttgcggtgggacggtcgcctcctgctgatggctccgcgttttcattgaccacattcattacaaagagacatttcaaaacatgttctgcagctgatttgctccttggccccaagaatggaatacagataatctgctcacatccatcaggtatctttctgtgatttcattttggaaatgatgttttaaaggcctctgactttcccgtctgtcctgggaacaaggagttcctccctggtccagggtgtttgtttgaaggccacacatcttttccaactgacgcttgtccttttctgtttaggaagcactggttttctttcgggacacaaccgaacgtgccaggactgcaggagccgctggattacagagcagcaaaccaggcatggcaggcggtgctcgcggaggtaccacggggcggaccagggtgtgcagcgttacgtgacttgggaagatgtggggggcccgatgtatctaccaggagacagtggagacctctaccctttagctgtcctctgtcccacacaacccagcccccactgggcggccactgcaggggaagctcagctggaaggttccatgggagagaccagaccagtcctggcactgtccagcagctgccttcggcccatgttctgaaaccgggatgcacacagcatggagatctcagccctgggcaggcctcgccccctccagcagctgccctcggcccatctcccaaagcctggacgcatacactggggagacctcagctctgggcaggcctgggttcccatcgcttcggcgtccctgggcccgggacacggaacacacttgctgcgtgctgtgtacaagaatgaacgaatcggcctgcctagcaccccttggccggctccaggcctccacttgctgtgtcaagtgaggctcccacgtgctgaggggacagagggtccctgtgacctgcaatgctcccactctcacccacgcagctgctcacctacacagccggtttctccagggctaacaggccacccagatgcaagccagtctcagcccctgaccacactggttttcaaatgaactgtggactctcatgacagagaagcggctgggagtcccagcgtgggatgtggtgggacggggctggggtgtgcagagacgatgatggaggagctcctgggggcacacagacctagtgtcgctctcagggctgggtccgcaggccactctccctccctcaacaacactcacgcctgctgcagccccaggaagggtcaggactcacagatgccaacaagcaagcagcccgtgctggaagcatcaccaccaccggccccagcaaaggcttcctggtgtgtgcggctgaccatcggccactcgggtagacagaagtgtgggtgggctgtgtgcatgccagggcagacggacagcccggggtctcaggccaatggaaacaggaagtttccggctccatttgaatactggtggaaatgccgggccctcatgctgaataggacactccatccaagcttgccgcctcctcggaggcttgggccagtcaccgggcccggctgtgctttcacagctgcttttcttatgggagagcaagatctcctgggattcaagaccctaccaggagtagaagacaagggtcatgggaaggctgtgtgagccctcaaggggcaccatggaccccgagcaccagcgatttgcgctcctggttccgagagcccagcgctgaatcctggcagatggggaagctgagctctgtctgacctgctctggaaaacaactggtccagagaaggacgaagatgtcacttaattctgagttgctgaggataagccaggggccctggaggtgactgtgctgcccacagcatcccaagggatgccacatccccacaggggcagcccaggtcccccagaggattgtgtgccccccaccaccaaggtccttgcccactggtctgtgcctcaataggacagcctccttctcacactattttgaaatataaaaataacactcatcacccatcacccagtcactcagaatcacaccagcgggggcacagaggcgacggcatgtagttctccagcctgtttgtgagcacgggtgtacatgtacacacacacacacacacacacacacaaatgcacatgcacggacacatgcacacacacatacacgtgcacacacagacatgcacacacacgtacacacatgcacacacacacacgtacgcacatgcggggtcagggagctgatgctgtgcgaggctgtcgagggcttcttcactcagcggcacttgggaagcgctgctctgtgggaggcccctcatccatgtcctcgttattggcagcacaaatctccaagtgaggaggggccatgtttaccagccgtccttccagcccacgtctcctacggttccttattttcacaggtactgttttgcagacacagagcccccaagcagcccacacgtcttagccgggtgaagctttgctttatgaagtgctgcctggacccctgatggtcggccctccccgtcgagacagtggcaggcaggcgggggtgctcagggctgtctgcagggggcagccaggacctcactgaggtggccgactgggtccacgccctcctcagcctgcactgctggacaggccccaagaagtcgtgctcggcgtggcccaagaacgggaagcggcagcgtcctggcgtcctaggtgagacttcaagacggctccctgctcccacctgggctaaaggtggaaccccaggtgtaaagagccccctggggtacaggggaggctggatcagcagacgccggctctgggagggccctgaggggctgtggagggaaggtgaccccgcagtggcagcggcagcggaagcaggacggcgcggtgcccgacacctgaggccactctccctggacggggggcgggcggcactgagaggcggccataaaaaccggagtttatttaataaaacaagagcccacgcggcagcagttgcctccaagatgaatgacaagcgctggaagggcggccaccttcctccaaggaagaaacagccccgctttgattaggaaaatattggttaattttccagtggagtgagtgaccttaaggggaaaaatctaatttccggaacagctctgtgaggcgtttgttctcaccactctcgttcgccttaatctgagtggttgtgggtgagcggcggccggggcagcggcttcccctggacctggtgttcggtcctgaacccctgggcaggcctccccttctggggcaacaggacggaaccgacaggcgcccagtcaggtcccgagggcccctctggacccacgcctccaggcagctcccatcgctagacatcctttcccacaagagttctatcttacgaggcgcccaccctgcctcctaggaactcaccccctgccacctctggagccacccagctgcctgggcccagctcagccccctggtaccatgaacagaagctgctgctttacactggctgtggggcccaggcttcctctagtgggtccaggtgggggtaccccaagttcctgcagggctccagacggtgggtcagggcctgggcagatgatctcactgccccgagcctgtgcttgactccggggagctgcacaggtgactcggcagagccggcctgggccggagaaggcacggggctggacccaggtccggggacccccaaagccatggttgcccaagttcgcagaggggaacaggcaccccagggcacagggctagccctgtgatcaggcaccgcactatccacccctgcatactggccctgcccagccactggtgacagcagtgattgcgacaacagcaaacacatgttcactgcaggccagaccgtgcacagagcagcctcagaactaggagctcctcccctcctgggatggggagtggggagggcacaccgaaacctgcctgaccccgtgtgggacccccataggaagcagcttccgggcatcagagagcaggaagagacacgagaagggcctggcgtcgcgtccgtgggtcgaggaccacaaatgtgttgccctaagcttctgtgaccctgcgtccaccgtggcagcccggctggagccaacaaggtggcagggagggcaggaagtaagcccacaggccacaagcgtctgtgccagaatctataggcactcatgtggccctcccagcccaactgctgactgatggcggcaaccctgtggggtgacccatgcccagaccagagcgggcggcaggagcccggcctcggccggcacagggtggaaggtgggggtgacccacgcccagaccagagccggcagcaagagcttggcctcggccggcacagggttgggggctgatggctgagcccatggagaaggtgggggagggtgtctgcacgttcgtcctggagatgggactcgaggtcacgggaaaccccgacagggaggccgtgctgggacagctcagacctcgaacgtgccatcctcgtggatgagaggcgtccccagcagtgcccaggaagcccctgatgaactgtgcgtcaccccagtgaccagggccagaggaatctgctcggggccccgggacagcacggctagtctgaaaactcgaggaatgcacgattcctggaaagtcaccaatcaccaaccaaaacggtcccaagaagaagaaaactagaatggaacagttagtgaaggcgtggcgaggaagacggcaggaggtccacacaggggaaggtgctggggacacagccttcagtgccggcgacctctgctttctcaggaacaggcacttacagtgtcgcgaaacctgttcagcatcccaggcaggcgcagaagggcctaactgatctgtgacgcctgcctgccaaaggccaggcctcctaggtgctgcccagggagctagagtcgcctgcctgccaacagctggttcgcctggctgctgcccgggagctggagtggcagaaacaatgggtgggaccaatggtgggaagagctcggggaggcagggcccggcacgggtgggcggacagtgtcagcggcaacgagaggggctgggaaccttcactggtgcccacgttgggggcagatgtcacaagattgttctggaatctgttggcctggggaggggccctcctgaggcccgagacccagggcaggacccagacttggggcagagcgggtcggggagaagccccagggaagaaagtgcttcctgtggggacacaggttgggatggacgtgacccagcactgggcgaggatcctgctgacctggcgagaggcaccgtttgggcagtttctcagggatgacggcagctgggttcaggcccccacacctgcagcgtagcactaggctgtggagctcactgggtttcccggactgggaggacctggcttggggctggtgtctctgccacccttagactcagagccccaggagctaccactgcccctccaagggtccccctcaatggaccttgcactggggggagtccaggctcaggatccctgaggctgagatggggcaatgccccgctccctgggcggagaggctggggcagccaggcttccaccctggcccgaccgccgccatctgagaggtccgggtgacgttatgtgatttaaaagttaattaaactgagtggtatgaagtataacagccccaggtgtttatttccaaagagactttggaaggaaaaggggagaaatctaataaaaagctttgcgagatactgcattaggaagtaatcataccgctaaatcacccggtgtcggcacaggccttgtaatgactccggacttgctgttcccctgcctcctgagcccacccagccaagacgccctgctgggaccctcgggctgccctctaaggccaggagagccaacaaatgagactctgagagccgcacgtgctgagcctggaaggggcgcctccgaggacgggccgctgtccctggagcccatgtctgcatcatttatccgggccttcacgtgctcctctagcacgcaccaagcactgagcacatgccagctcacagcgcagggcggccgaggcacccgcaggactcaaggctcagggtcctgtcccagtgtggagtgggagctgataacgacatgcaccaggagactggagcccgggagagccagggagagccccgaggaagtgcatctgggctgagaccccaaggatgtacaggaggtgggggccctgatgcggaagggactgcggatgtcatctcagtccaccaccaccttctaacagcagcggcactgctgactgtgggaacttgccacctcacgggactgccctctgtgtcgggacaggcctggcgagaaggccccacgcgtgtggagctgacacctgcctcccctgtgggtggcacagcaacagcaggtagcccggtccctctggaaagagcggaggtggaggggcctggcagggaggacgcacacggcagccctgccttcattcaacaaacacacgctcagcccggtcaggcatcagacggcagtgacagacagaagcaggtgacagcagacgcttagcaccagtgtcctcctgggcacagaggaccttatgccatgcttccttgccactgccatgcctgaccccgctccagcccccaccctgcctgcctgaccacagcagactgatcaccagctcagaaacactgtccccgccgccctgcacacccacacgcctccctctgcacgggggccccctgcctctcccaggctgagctcagaaggacactgcctccttcctgtcccacccttccatccccgcccaatgacaggaggcagctgggactcgcctgcaaggggccctgcctctgcaccccctcccaacctacgatttcactccgagcagcctgggtggccgagcaggggaggaccgggcaggccccacctggccgtctgacaggtggactctcggccctgttatcagaaagtcctgtcaggagccagccagaaaggccatcttttggtcatttatcaggctaataaatggcttctcctgctgccgccagctcccggcgccattctcatgccgtgcactgggagcttcacgattaatatcactcattgtgaagggtaattaccagctcgatcacgggcgtcgggtacatttatccaccccatccaggcgtggcggaggccacatcactcacggggctgcccagcctctgcccctggggcacctccacccccgccccaggctctttacattctctgagccccaacactgagcacccaggacaggccgcacccaccatggccccggtgcctcggtgttgggtactgagcccgctggggctgggagtggctgagactgccccagccccagcagcgagcggacgtcctgggccccggcagctcgtccccaacccccgctgtgggggaacctaccctgtggaagcctgtattggtccactcggccgctgcagactaggtggctcgtaaacagagttcacttctcacaggcctggaggccacaagggcagggtaaggcacaggcagacttggtgtttggtgatggagctttctcactgtctgtcacacgggggaaggggcggggggactctggggtcccctctataaggatgttaatcccattcacgagggccccaccctaccacctcagcacctcccgaagaccccgcctcctcatgcccctcacagtggggattcggtttccacgtgggaactgcgggacacaaacctcggtccccagcatcctgcccctgtccccacagaacccacatccttctccaccccagcagccccaacagtctcaccaaccatcaactccaaagtctcctctcaacctcactggcgtcacatacgggggagacaaaggcaggacaggaggggacggacgctcccatttcaaaagggggaaaggcaagagggagggtgccaggccccaggcaggccaaaccccgaggggcaagtcccgtgaggcccagaggcctgagagctgccgctgtggctccatgctccacctctcgtccactggggaggccccgcgcccaccgctggcagagctcctggcctgtgggaggcacgtgggctgcggtcccctctgaagaaggcatcggcggctgggagttttccgaaccaccttcagggtcacccttcctctgcggtgaagagccgcgcgtgtttgccggccgacagctctgtggtcctgtcatgtcaagtccaagtcgacagcctccctcatccttcccgtctccctcctctttggttccagctggcggtgtctctgccgcagtggcagacggggcctgaggtcacacccacacgagcctccctatcaaacggttgcgggccacaccctagggttctctccctagggttgctctcgttttctccagcagcgatgacagcgacaagctgagcattccccaggtgcttaagttccgcttccttctgcttgatgccatcctaggccgcccctctgtgcccgcatctgactataacagcgggaggaaaggctgcacctcaacgcctggcctggaaagagctgtggccaaatctccagtctcatccctcacacactcactttccagaaaacacggcccgggcccagcccagcccagcccagctccacccgaggcgggtctcccctcaccaccacacacacccacggcctcctcagagcggccttgtccgtgccccctcctaagattctgggagcattccttgtgcaggaagatgggggctccctccacagtgctcctcccttcctcctgagccctcaccagcatcacctttcatggcctgttctcggcaacatctgcttttcacaggctccaccccaacccttccagcctctcccactccccagctccagagaggctttcggggtctgttacagctgcaccccactcttggtaccaatgctctgtctctttgcgtccagctgctggaaccccacagacagggtggcttatgagcagcagacattggctgctcaggttctggagtggaagtgggaactcaaggcgccggcagacgtggtgtctgctgaggggaggcacttcctcgcggtgcgctcacgtggggtgcggtgagggagctctcggcttcttcataaagtgctaatcccagtccaagggctgcacttcctaatccctcatcttgggcgttagaatttcaacgtatggattttagagggacacagaccttcagcctgtggcaaggccccgcgccctcctgcttctgacgcctctccacacgtgcctctgaatagggacatggctggaccggggaggggtgtgcctgtggggccagcaggtcgggttgggcgcagggagaaatgaagggaaggaacatctcgcttcggttctggctgaagacgtggggccacgctctgggctcagcctgtcccaggtgctcggggaagaacccgccagtccccacaggccagcctctgtgggggccccctgcctccagcggcccctgccggggttgggggatgggaagggggaaccagcgcgcggagcaccgcccacccccacagcccccgctggccagctgtcggctaatctgctggctacgagcaggtaatttctcattggggcctgctcgctctctgcttatcacccgcggcctgtatccgctgcgtgctgtgtgagcagagataagattcattaataaagaaaagttcaggaggagctgctcgcggctcctccacaaacccagaagggaagatggcacagccccgaagatggcatagccccgccgcgctccagaccagtccctgcttcctgccagcggcagggcccacgcgcaccccgcgtgcctccacgttccacacgtaacccaaccctggaacgtggtctcgggccacaacggctggagggactcctgcgggcctctcccaggctctgtcaccctgggggagggagagggagcctggacctcgctgcctgtgtgtccccagggaggccttcagaccgagctgaccatgagctgccacacagcagctcatcctgtttcctggaccccccaggaaaccctgactgtgctggaccctgctggtcacgcctcctgccaaccctccagcagcactcgggtgaggacgaggagctgcggggagcagactggtggggcaggcaggacagtgtcagggtctccccctcggtgcccgaggctctgggaacctccaggactcctcaccaacagcagccagagccacggtttcttaggcaagagccgcgagcgcggaccgtactggcaccttcccgaggatttcatcagcagccccaccaggaggcacggctgtcccacgtctcgggcgagggtgggtgcgatgactttccacagcctctgactcagtgctcagggcccctgaaacccgcctttgctgtgctcggggggcggcacaaggtagggctgcctgccggtgtcctggtcatgccccgggaggcagccagccacagcctggtcccttgctggccccatgacccacagtcaggcctctgctgtcacataggcactcctcacagtcccccaccccgcgtgtgcagctgagttttcagacagaggaacaggacggtcccctcgctgccatcttttgagtttctgccctgctgcggctgggatgaacggggctcaggtgagggggctgggcccgaggatgagcccctggaccagggctgcctgggaaaggacaaggaagggctgggccagctggacaggaggaagaggggccttggagcaaaaaagaggacacaggagtgtgggcaaggccagggctcaccaggggccgggggacgtcctggtcctgctacatctgaggcctgcccggctaggccagcacgacgccccctctgaggctctgatgtcccagccagtccttgtctttctcatccactcagtccaggaaggcaggtggtgcctggggacctccaggctgggggcccagggaggctcttgtccaccccggccctgcagaacctgcagaggcagcccttcctcccgtccccagggccgagtcccttggctgtggcccacgctggcaaccgctgtccacagagcccgaactttcctccctgcctgtattaattatgacggagtaaacaacagagttctggaaaatgcacgtttccatgtgactgcttttttttaattggtaggtctaacatttaaaagctgctttaatttcttaggcttgcttttcctcagcacgggctcaggctgagagcagggaactcatcactggcgcgcccgtcggtggcagtgttgggagtcttggagcacaggcagagtcccctgctcgccacaaccaggagatagcggtgctgggatctgagtggggacatgggctggccagttgcaccccaaggccggaccccaactccgttcctggcccactctgggcatgacaggggatgaatggcttttgtttttgccttggctcagcctccacctggcttggagatctctgaaatccttggtttctgaggcctcccttccacccaggggctctgcgtgtgagagggtggcgtccacggcgtctccggctcccatgtggtgcccccacctctgcacacctgagggacaggcgtcctggggtcagccctgaaactcattcaggtcttgctgaccctgtcccggcaccaggacgcccgcggtgcctcctcctacctggcggggctgctagggtcagacccacgccacagtgcagggcagactgggatagtgagaacatgcgcagggcacatggtggcgaggacgcatgggctacacagacacgaggcccacaggaaagccacagaggccacagactaggccaccatggggtcccagggcaaggggcccccagctggaaagtaggcccagcaggaatgcttcacgagcacgggcagtcagagcctctgcccctcctggcttcagggacagggcctgaccacctctgggagatcccaggtcagggcagggggcccaggtcatgacttgcaacccacctggaccaccacgcctttccactgaggctctgaaaggccacccagacacagctcagatctggggggcgtcccccgactcggcctgcatgggagaggtggagggatggagcagacctccacaccaaaccccatacgcaggagggccaggcacctgagagaggcctgcagagacggagcagacctccacacacaaccccacacgcaggagggccagatgcctgagagaggcagtgggagatggcgccgggcttccccagcctgcctccccctggtgtgaaggaagagccacttcccagaacgctcaggcagacagctgggtgcgcagcagctgtgatgatcagaaccctgaccaggccacagtggcaacgacagcctcctggggctgcaggttcaccaggcgtctccatatcggcccttccagcttgcatctccccgttgattccaactcattctgcacagggaaggatcagggcagagccacagggatatgtgtttcggctaccgtgcaaagggctttgaaaagtcagtgctgcccacaggtggggcaggtggctgcgaggcggagcgcatcccacctggaagccccacaagtgggatctgagtggccccaggtgccaggactttatgtttttctctggggaccttatggcacccatgatggggaccttgccagcaaggagtggatgccagtggcagccctgcagaggagggaggagacaggccccaggcacagccccagcccctcagctggtgctctccgtagacctgacaccctgcagggctccctctgttccctagacgtgacatcctgcagggcggcctctgttccctagacctgacatcctgcagggcggcctctgtctccctagacgtgacatccagcggggtggcctctgtctcccttagacatgatacccggcggggcggcctctgtctccctagatgtgacatccggcggggctgcctctgtctccctagatgtgacatcctgcggggcggcctctgtctccctagacgtgacatcctgtggggctgcctctgtctccctagacgtgacatcctgtggggcggcctctgttccctagacctgacatcctgcggggcagcctctgtgtccctagacctgacatctggcggggcggcctctgtgtccctagacctgacatcctgcggggcggcctctgtgtccctagacctgacatctggcggggcggcctctgtctccctagatgtgacatcctgcggggcggcctctgtgtccctagacctgacatctggtggggcggcctctgtgtccctagacatgacatcctgcggggcggcctctgttccctagacctgacatcctgcggggcggcctctgtgtccctagacctgacatctggcggggcggcctctgtctccctagatgtgacatcctgcggggcggcctctgtgtccctagacttgacatcctgcggggcggcctctgtctccctagacctgacatcctgtggtggcccctgtctccctagaggtgacatcctgcagggcagcctctgtctccctaggggtgacatcctgcagggcagcctctgtttccctaaatgtgacaacctgcagggtggcctctgtttcctgtccctcgtccctcacaaaacgctttgttcttccccagtgaaggtctggaaaacgaagctgcccagctctgcctgggggctcccttgggtgcctaaccgagggcaggggctactggcgactgcacccacatggctgccggcctcagggaataaggatcccctgggcatcatcctgggcatcaccccggggcctgacctccgctcacatctcaggattctctgaagtgctctctctcggcctcaggaagggatgccgtgagcatcccgagcacaagggcactgcactgaggacagctcaaggctgccctgggtcacccctgtgccttctgggctctccggcagctccagctcatggcagacaggccggccgtcaaatctcccacccagttctgggtcttgcctggaggggctagtctataggtggttgtaccagcagctgccccgatggagtccacctctgtcctggcccgcccctcccctcggaagccgtcactgggacacccagtctgtaccgcacaagtcccagcacgcaagcccagaggcggccgctcaccctgcccctgactggacaactgcctccatattcaaaccacaaccaccaaagacgggcaggaggctggtgaccccccggggctgaggctggggctcggccacggctaggctctggggagcagggcaggtgctgggtccggtgggggctgggctgagaccgggctggtccccctctaggcaagggccctgggcacatggctccacctggctgaagctatcctttcccagtgacaacggggctgaggtggggactaaaggccacaagggccaggacacgcctctaaacagaagcgtcactgctccgcctgccccctggttggagggacactgctccgcctgccccctggttggagggacactgctccgcctgccccctggttggagggacactgctccgcctgccccctggttggagggacactgctccgcctgccccctggttggagggacactgctccgcctgccccctggttggagggacactgctccgcctgccccctggttggagggacactgctccgcctgccccctggttggagggacactgctccgcctgccccctggttggagggacactgctccgcctgccccctggttggagggacactgctccgcctgccccctggttggagggacactgctccgcctgccccctggttggagggacactgctccgcctgccccctggttggagggacactgctccgcctgccccctggttggagggacactgctccgcctgccccctggttggagggacactgctccgcctgccccctggttggagggacactgctccgcctgccccctggttggagggactcctggccccccagcccaggagctgctgggaacgtagagggctggggtgtgccctcagcctcagagccccaccgccatgcaggggatgcagagtgactagagaagtgagtctcttgaaggcctcctagacctgcagagcctctggcatcagccatggctggacacccccacccatttcctccacagagaaactcggggagctgctcaggggtgtctggggcgtccccaagagcggcaccccgcagcctcggtgctctggacttcgggagccaggttactccgggttggtctcctcagcacaccgagcagcaccccgggcctctgcccaccagaggccaacagcctggccccagctgtgaggactgaaatatctccagatgttgccacgggtcccctgggaggcagaagcagccacagtttgaactgtgccctagaagacggcaaagctccacagaggccttccctcctcatgtccctgtcctgtgcatgaagtctggtggggaccccagaggcaggggcttgaggatttgtgccggagagtcccgagactgcagcagggccgacctggatccctccctccctgccttgcccctcccaagctgtgtgagtctctcaacctttcacagtgtcagaatcctctgtacaataaagttcatcagatccactcagggggcattgctggaggctgagggcatcggccctggccggtccagcaagtggctgccatctaggtaacggtctgcctacaggcctgttatttacttagtattttctttaacccaactttccttattagcttcaataggcccagtgaaaaaggaagctttacatcactgctgtaaaatgaaaaaaaacagtgcttgctataaatagagtgacgatgaaaacaaactcaaaagagacaaaacaattcaccgaaaccctcatctactggtctgaggtgggctctgggcccacagctacttgccggccgtagaaaggggcccgcagggtcagatgtcagggtcccatgggcactagactgagtccgtgtcttcaggggatcagacaagtcccacatgtgttggggagacccagagcctcctcctcactgcctggttgctgattgtggggccgtcttgcacaggcctggaggctgggaggggacgctgcactccgcaccctccatccaaccccccaaccagaggagggagccccaagccccgcaagccaggtggcgtccagatctgagcgcacgaggaggccgcctcagcacgggctgaagacctcactccttcggcctccgaagacggggttagcggagcccagggcggggtgaatgccgggtgcggctcatcaggcccgagagggcagggaggaaggcctggggccaggatctagttaggcactggtgagggtccgcagagagcctgttaacagtctggctgcagaaaggcagctaccggcaggcccggggccagcggcacggccgtcacaaggcctgggcggggagacctcgcggtccactgagggcctctgtgaggagaaagatgagacagcacttcagtcctggggagggtctggaacaagcccccgcacagcacggcctggctgaaggcccgggagccagtactgaggctgacccctgagcagcacttcagccacatctcacccccagacccaggaggagacttgggcttgcagagaccgtcacctgcccacaccccacgcgctgggctcagcctgtgttctcagctgccctgccctgccccatcttgcccctccgctccctggagctcctgggtggagggtggccggcctgcagtcccggaacaccgtgggctcccgtgctcctgcagccccgtcaggcacccgggggcccaaggatagaaagccccgaggaaggccaggcgcggtggctcctgcctgtaatcccagcactctggcaggccgagccaggtggatcacaaggtcaggagttcaagaccagcctggccaagatggtgaaaccccgtctctactaaaaatacaaaaaattagccaggcatggtggcacgcacctgtaatcccagctactctggaggctgaggcagagaactgcttaaaactactctggaggagcagaggttgcagtgagccgagatcgcgccactgcactccagcctgggccccgaggaaagccgagggagaaactggccaggatggggacggggcggccctgcggaggaattcccgcagcccggtgggacttgcagaggaacaaagaccccgggccagggtctccaggagggtcagacagttggggagccgctttcctggccacttgtgttgctagcagagacacctgaacacctgaaggaggaggggaggcggctgcagggctcatggcctgtctcagctcagcactggctccctgcagggcagacccggggcccctttcctggacgggactcgggggaacttgcctttggccagagctccagggaacctgcagatcaaaggtccagcccttccttttgactggggctcagggctggatgggtcattatccaaattgcttctggcttctgaacacccccctgccgggagtctttaaagggtggatttgcaaagtccccatgacacagttgctgggcaatttgtcaggacgaggaaatattccttagacatccacacgagctgatgcccagaactgctgcagcggtgcccttcccccatgcggggctgtggcctggacgtctgtctcccgacctcacgtggacccctgatcctcgatactggagtggggcctaaccggaggtgtttggccgtgagggtgggccctcgtgaacagactggccccctccctggggtgagggggttcccactgttgggagagcctggtgccccccgcccccactccgcccctttctcgctgcgtactctctgcacacaacagctcccctcgacttctgccaggagtggatgcggcctgaggaccttgccagatgcaaatgtccaattttgaactctgcagccagcagaatcctgtgtcgaataagcctcctcataaaccacgcagtctcaggagctctagtatagccacactgaagcactgagacacctaccacgcccgcagctcaagtccccacctcacgcccactgaccacgctctcacttgtctagtgacacccttccgggagcatccctgtccccagtctgccctgtccagagcaggtgaccaggcccatcctgtctgggactcccggaagggggcacatgcgtgaggcgtgcacaagcacccaccctatgggatctggcccacagagtcaggggcccaaggcttcccaccaagaccccagctctccacagtggctcctccttggggaaagaagggccagagagaagctcttgggggtctgcaaggcctgtctgcctgtcccttgagtcaaagctgaccttgccgggcacagatggggcccccaggcctggtgccagccccggggcatcccagccctgctgctgcccggctgtagccctgagtgcccacagcagagctttcagaggtctcaggacaccctgccctgcaagcttcccttcagtctcctcagaagaaattgctttaatattatttacaagcgcagggcgacggagcagccagatgggaagatgagtctttttacgatgcagggaggactggagacctgagaagggatactcaatattaataccatcacctcagtgtggaattgaggcctcttggtaaccagaggctgttcacacaagatcccttgaggaatgccttccacaaactttgatgtgaactaattaagtttgcacagttaatcaggactggctgccttggagacgcaaaggcacagacccagagagcggctgctacgggatctacagcgactgctctctctctcgaatggcagcccctcctgcttgcaggccctgtgcaccgcctgggggcttcggggctccacgagccagatgacagcctctagtgagccactgggccctcggggaagccctggacaagcctgccagcgtgacaggcaccatcggcccgcaatgggccaggcagacagccgtgatgcgccccaggggagggtggggtggtcctgggtctggagaaccatgctggttttgaagcaaaactcttgggatagccagggatgtccatgtcagagaccacgagtgccccctgacagaccgtgggtgggagcacagatgctcagcagggctggttggtgggaggggggccagaacgcccgggtgcacactgggagccaggtgcctgggttgggagtatagggcctcagtacatgctggaagccaggtgcccaggttggtggtgcagagcccgggtgcgctctgggagccaggtgcccaggtgggaggagatagacgcctaggcccttgcgctgtgggtcccgacagcctctgccctccaagacaagggtggagccttgcagagcctgctcctggaaccctaactggttctgtaaagctccctgtgcccccactgcaggctgaggccgtaacatgctcccaggaacaaagggctgaagcaagagatgagagcgagctccaccctccagacggttccagtctctggggcagagacacgagggtgcactgtgctgaggagaggtcttaagtggggaagaggaggctcagggagcgctacagagaagctgctggtgtgagacgccacgggaggctgcggacaggcaggcaacgcagaggccatggcacctcttgccggccagccccagagcagtcctgcttggcgggagcgttgggggcaggcaggggtgaagggcagggaacatcgtgaaaaccaactagatctgttccacgggctgacgggagccctgagggccttcagtgagggtgtaccatgactggggaagcagcaggaggcagcgacatagggcccggtgagggccaaggaggagagatgggcagctcagctgccagcgctggctgggccaggctcctgcaggcgtctcactgtgctggcctgctctccatgcccacagcggtcctcctgcagtagggatggggaggtgcagctcggaggtaggggaggtagtgggcagcactcactacagggcccgctgggctcctgaccgcagagtgggtcaccacagcagcacctgctggcccagtgggtgaggggctgaggtcggctgcagtacttggagatctagggccaagctggggcgaagtgggagacagaggcaggcagaagctggtgagatggatggcacggtcagtgccacagacatgggcaccgtaggcctcccctggcatcactgaccacatgccagggacacacatgaagctcatgcccagcccaagctccagaggccttcggggctaatggaggaggggaatgccgggacaaggaagtgtgggacaaggaagaggtgctggctgcctccgcaggacccccccggaagatgtagaggagagaagcgggtccagcatggaaggcggcactgcagcctgagctccaggtctggatgaggcggtggcagcagcttcctctgggggccgcaggaattgggacagatctggcccttctgctcgcccaatcttctgcagagtgcaaagcgggccatgcatcccactgcaggtgtgcagtgagtaggagcgaggtgggccatggggcgcggaggcttctgcacatctcagcagcactctgccagattctaccggtggctcgggcccaatttccattccaggaacctgcgcctgaggcctcctgcaggcagggagaagggccacgcttcctggcctccggggcagagctcctgcagggtggctgtaggggatgggaggggtggcacagggaggtgacacagtccctcattggagggactggacgggctgagcactggcccctgccatcagctctgggacaataattggagctgaagttgttccaacgacttattaaaaataaatggcgatgcatcggaggcagtccctgcccagatgagagccacataattagagcagtgtctgtgctcgcttctcccgtcttccctaatacggggcgacaaccgtctctgaggggccctccacatctgtcctctgtgtggccagtgccctgccctgccccacatggcgctgagcagacgccagcagtaattcccctactgacctctgtaagcactgtccctgccgtgcccgctcagagtgggccctcctgcaccctgccattcagcccagcgaggtgcactgtggccccccagacaccagcactcctgaccccacagtggcccctggggtggacaatttggccaagataaccttgaggcagaacagggagccaagccccacctgctgataaccgaaatcagttagaactttctggatttttaaggaattggctctgagatttcaagtcactgcctccccagctcctgggtactgtggaggcagcgtggacttccatggctgctgccgcccagcacacaccacgcttcccgggctgctcccacgcaggccgcgcctcccgggctgcgtgctgctggagtggggccctccatgtctgtcctccccagcgaggcctcccacccaccccaccccacggataatttacacaaagaaagtacaggctcagcagggggtggggaagggagctcctggaggtccctccagggatggagcatcatcctggggtcctgggattaggcttggatttctccagcgcgtcatgcgatacccttgcggcctgcctggaagtcagcacagcccatgccgggtaggagtgacacgcactgcgtgttcacagccttaaccagaggcgagagttctcacagttggggatgcggctcagcaccaaggggccaacaggacgcagtgacgaccaccaggggaacgcccagaagaccagcatgtcagctaaggagctgaaggtgtgacctccccacacaggggcccagcggtgcaagccctggcacaccaaccctctgcatggagaacctggcctcttccccacacggacgaagctgagcacggaagcgccgcctcaccgcgccaggcagaaagctagcccggcacagcccaaaccctcgcgtgtgtaggactcccccaaggctctgtgaaaggcaggctctggctcggcaggctggggtggggcccgaatggcaccgacgcaactggtccaggccacacgtggacggtgaggcccgggacgggaacatccgagcaacgatccatgcccaggcaccatcgcccgcccccatggctgccggcatggggcggggttgggtctcaaggagaaggcacacacgctgctgtgggggccacagaggcccgggggaacgccagggaaggagcagtcagcccacgtggagagcaccccttgcctgggaccccctcccacagcctctcccagaggcctctctgagttcccagcatctacctcggcgcaggctcttagctctccctgaactccaccttataggctctcaagggcaagaaccaagtccaggttcctaaactccccaggtttccttaaatccccagcccagggttgggcacagcgatggcctgcaagagctcagcccacgtgcagctgggagcaggtgacctccccagggccctcttcccagcgcctttgctgcctccccttctctccaacctcagtatcacagggacccgggaaaaaacactgaaaaacgtgacaaaacggaacataaccatgttccagcctggctgtgccatccatctccagctgccgaagggtaatttaattagcctgcgtcggtaatgagctacgattgtcaatcagcactgtcacactagcacgggttgagggggccgaggaccacagcctcatggagatcacgtgcgtgggctccatggaacacatcacgactgtccctgcaggaggtgatgccacaccacacctagactgggctcccgcaagtgcctccatggggcaggcaggttcaggtccagctgctgacggaggacccaggctcgtcccacaaggcaggctgtgagcccaggaagcaacggggtccaacaggcggctggctggagcacttcataagccaaggggtgcctcgcccgtgcctcccctgcccctgccgtgccaacccggagtccacattggtaggtgaggtgtgggaggcccagacacggcagaacaagcctgaccttgaaccgagacagggagagtgactgaccccagatgcgagccgctgcccagaactgtcggcaggaaggctgtgcaggtggcagctcacgatgtgtcacatccggcctagttggtgcccaacatatgcctgccatgctgaacccaacatatgcctgccacgctgaaccgaccataacacctgccacgctgaacccaacatatgcctgccacgctgaaccgaccgtaacacctgccacgctgaacctaacatacgcctgccacggtgaacctaccgtaacacctgccatgctgaacccaacatacgcttgccatgctgaacccaccataacacctgccacgctgaacccaacatactcctgccacgctgaacccaccgtaacacctgccacgctgaacccaacatatgcctgccacgctgaacccaacatacacctgccacactgaacccaacataagcctgccacgctgaaccgaccataacacctgccacgctgaacccaacatacgcctgccacgctgaacccaccgtaacacctgccacgctgaacccaacatatgcctgccacgctgaacccaacatatgcctgccacgctgaacccaccgtaacacctgccacactgaacccaacatacacctgccacactgaacccaccgtaacacctgccacgctgaacccaacatatgcctgccacgctgaaccgaccataacacctgccacgctgaacccaacatatgcctgccacgctgaaccgaccataacacctgccacgctgaaccgaccataacacctgccacgctgaacctaacatacgcctgccacgatgaacctaccgtaacacctgccacgctgaacccaacatacgcctgccatgctgaacccaccgtaacacctgccacgctgaacccaacatacgcctgccatgccgaaccaaccgtaacacctgccacgctgaacctaacatacgcctgccacgttgaacctaccgtaacacctgccatgctgaacccaacatacacctgccacgctgaacccaccgtaacacctgccacactgaacccaacatacgcctgccacgctgaaccgaccataacacctgccgcgctgaacccaacatacgcctgccatgctgaacccaccgtaacacctgccacgctgaacccaacatacgcctgccacgctgaacccaacataagcctgccacgctgaacccattgtaacacctgccacactgaacccaacatacgcctgccacgctgaacccaccgtaacacctgccacgctgaacccaacatatgcctgccacgctgaacccaccgtaacacctgccacgctgaacccaacatacgcctgccaagctgaacccaccgtaacacctgccacgctgaacccaacatatgcctgccacgctgaacccaacctacgcctgccacgctgaactgaccataacacctgccacgccgaacccaacatatgcctgccacgctgaacccaacatacgcctgccacgccgaacccaccgtaacacctgccacgccgaacccaccatacgcctgccacactgaacccaacatacgcctgccatgctgaacccaacatacgcctgccacgctgaacccaacataacacctgccacgctgaagccaacatacacctgccacgctgaacccaacatacgcctgccacgctgaacccaacatacgcctgccactctgaactcctgcacctgtgatggcggtgcaggcttccccggagggccagcagctcggagccccagaggagatgtggaggggacatggaggggacagggtctagggtccccacacttgggggtggaggagatgagaagagagggggcagaactacggtggctcagagcccacaggacagagaaagcagagggagggagagacaggatgaagacctctcatctccaggctctgctgtgttccagcatgactcccaggcggcagctcctgctgacagatacaggcccaaacagcccagtccaggccccaggccttggggagcctcctccacaccctgcaggccatctgcgctccctctgtcccctgtcccgcgacagagaggctgacacctaccccgcagggctgcctgcagggtcagacatgcacactgtgagccccacggggtgctgcaggcctgggactcaaacactctatagagaggatcggggccacactggggctgccgcaccgtttcccagatgacaggtcatgcccagcggcctggccgatggccctgagccccaggaagtgaggcccctggtccaggtgcaccaggcctccccacagcacctgctcctgggtgagccctcaccctctgcgctgcggcttccccgtctgtctctgctcccaggccctgagcctcagggcaggcagctcctcctgttcatgtctagcccatgtctggcatccaacagtcgcctgcgacaccgaactgggctcagctgaacgagaggcctttctttccagaacaggatccaggctgaaaatcacctccaggacgcagcccagggcagaggccgctctctgctcccgccggctcacactcacacgggcaggtctccagggctgtcctcctggctgcggactcctgggcactggaccgtgcctctctcatctgcccccagcacagggccagacacgggtgatatggagaaacgcttgctgaacgaataaacacaggaatgaaaagccagctccgagccttctgtgtgctgagatcgaactccacagtgaggatcgttctgtttggagaggacaccgcgatggacgtcaataaaacgtcaacgcttccagtcaattcaaacacccagggtggggggcgcgtcagaaggagagaaagccggaaactgtcacggagagagagatggccgtgatctttaatccagaaatcccactttggggactttatccccaggtgagaaacggagagaagaaagggcccagcccagcaatgacgcaacgagtcacacagggaagggctgcatgccgagccgtggaggagcggggaggagccccccgtggggctggtgggcccggttccaattctggtgcagcctctcctgcctcagtgtcccttttcataaggggggccttgacccccaccgtaaatgtgtgcagggagcctggctcacaggccccatccccggctggggagtcccctctggacctcacgggctggggcgcgagtccgggtcctgtcctggggcctcaatgggctagagagcgccagccctaaatggggttgtaattacagcaagagggtgggagcaggggcagggctctgggaggaggttggggaggcctcaaggaaggtggcatttgggctgagtcctggaggatgcgaggggcggtggggaggggcaggtggggagccctggtggagagctagtaggagcacggcacggccggggctggacagtgctgaggggtacgggcaaagcacctgggctctctacggatgggggccaaggggctcttctggggctgggcagggggctctgcggtggatggaggggtagtgggagatcctggcaggggacacaccagctgcccactgctgcctccctcactgtaacccccgaccaccatgggggagtgggcaccccgggtgcaggatgtgccctgacaagggccgcagctcacccctgatggacacccccaccgaagcccaagctggccctgaagcccagtggggagacgtgtgtttggggagcaggcagggcttatcctgcctccagatgctgagggactcctggccctgaaactgctccccgtggctgaacgagaatggatgctgagcccatcaagtcggcaccagggaggaagcgtggagcacacaggcccaggctgaggccagagggcctcttggagcaccccacgccagggtcagttccggtggggaggcgtggaacacacacaggcccaggctgaggacaggcgggcctctctgagcaccccatgctagggtcggtgcttctgcctggccaccggggatcccgggacggtgttccaggctctccatctgcaccggagtggggatggaaaacgaaggtcaggctgcccagcagacagtggctggcgccagaggtcagtgcagcgaggccgtctcggtgcacggctggtaagacccggggtctcccaccagcgcatcagctttggggaggtgacacacactggcagacaaccgtgtcatcgcacggccaggctgggccacagtgcagaggacagagggggtgaccgtggcttgggatggtcagggaagcgtctcaggaggagacgttgcagcagcaccgggacgggggtaagacggtggccaggccgtgacatcgagggtagcacccgccgtggccagggtgaggctctggtggaggagaggaggcggagggctgaccttttgatcttgataatcctatagctttccgcacagcttgtggctgagtgcggcttccttaaaaaaaaaaataaaagcgctgttgagtggctctcacctatcagcattacccagaggcaggtggctcttcatcgatcgcctggtgggcttaggaattgacccaggagggaaaagcagctcgcagcacaccacctgctacctgctcgattggggccttgtgtggctcagcaggacccacaggccctcccgcctgggcacttagtgtacacggggaggggtggggctggagggctccaggagagagaggttgggtaggatggtagagaggaggggcaggtatagggaggaggggaaggcagggagagaacacagaggcctccggctctgcagcatggagaccggccacaccccaggcctggccataggcaccctgcacctgtgcccagtgagtggcccccaccccgggccccggctgggcctgggagctccagggcaggcatactccgagccaagggcctccttcccctctgcagggcaggctgggcaggtacaatcaggacaagctccctgtgagactggggacccaggcccagtcccaatccaggtgaaggtcccttccttctgccccagagacgactaacgagcagctcccctggctgccccagagccccccacaggggccatggcttctgacccttcagactcagctgttcccaggggccctgctgctgccctgcccgcccccacggctgcactcaagcctgcgctgtgcacaccgaggccagctgagtaccggataggacctgggctgaggctgcccagctcacagggaagcagaagccgagagaccaagaagaaaacatcccccaactggctgacagtcgccctcctcgaccccagatgccactaagaacaacgcgaagttctggcacgcagggagggaagtccgtgttgacttgggggcgggtctgcagcaggaaggctgggcacaccctccactggctgctcactaactcccctgctggcagaaccttccgctgcacaagcagaggagaaaggaaggcgtggaacacagcaggtggcccacacgggctgggaggggcagggagaggaaaggcggcaaggttcccagcaaaagagaagacgccactccaggaaccccgggaggtataagggaaccctgtttagtaacgctgcatgtgcaacagataacaggtagttcacgtgcacagacgtgtgcgaacatctatgatgtaaccgagcggggctgtgcagagcaactgttacaggctgaactgtgtcccccaaatttagatactaacctaatccccatgtgactgtatttggaaataggacctttaaggagggaagttaagtctgatgaaggtcataagggtgggtcctgatccagcaggggcaccagagctctccaagtgcacagtggaaaggtcacacaggaatacaaggggcggccgtccacaagccgggaggagagtcctccccaggggccaactccggtgccctttgatctcagatttcagcctccagaattgtgtgagacacacgtttgcggtctcagccccccgccgtggggctctgtgacggcaaccccagccagaccagcagagtggtggacacggccaggtcttattttggtgaactagccccttggctccatagatctctgtaacgtacttatgcgggaggatggtagcggcatggcagccccacctaggaagcaaggtctccacaaccattggtcatgttaaaccagctccttctctggaggctaagggcctcacgtggtcaactgcagcccaaggtcccgagccccccgtctggtccaacaccaggtgctttgtctctcttctccttcgcacaggtggtcaccctgccggacgctgcccctttccccaccgtcctcacccaccgagaccaggtcctaccacaataaaaggactctggttagggctttatggagtcaccagcccttcagagacacatgctacaatacttgaatgattgcagctaaattaattacgataccttggatttgcttcagaataatccaggaagggggaagagggtgggatgggctcacagggacttctcgatgctgttttccatatttttatatatatgcttaaaactttccatggcaaaaagtgaaaataaacacaaacagaaaccaaaccaaaagctaaaagatgacaactcatcctaaccaggccagggtaacctcctctcaaaacctaggctctggaaggacatcttgctcctacccccagaaggtgatgtccttggccccagagcccctgccagggctgcccggtctttacccctctgctcaaggccacacgcacaggatgtcaacagtatttgtagaattagcgaggcagcatgggaaggtgcggttccatctccaggccccccgccctggtcctcctcccactactgccagaagcagtaaatatgtgaatacagttcacgtatttaaataggtgaatacacttcaacaagcatttttgaatcattttaatttagaagataatgtactctctaaagtgaaaaaataatttcacaaaaaaattttgtgtaaaaattacataaaaagaaaaaatggaaaaatacttttaaaatgctctatgttaactagtaagattatttgaaaacagactgacatagagctggggtcatcaaactccaacccatgggccaattctggcccaccgcccgcttttgtaataaagttttactggcacacatttgagctcattatgtaacagttccttctgtgctacaacagcagaggtgtgacacagacagtatggctcccaaagcctaaaatatttgatacctgtttctttacaggaaaggtttactgacccttgccctagagcaataactaaaccaaaacagaagaaaaccaaagaggtataattaataagccaatgttggagaaaacatggaataccaaaaaacagcccaaaagaggcaagaaaaatgaaaaaaagaatatacgagacaaaaagaaaacaaatgacaagatggcagatttaaactcaatgtcataaaaattatattaaatataaatggcatagattatcagtctgaataaaaaaagcaagattcaattagatgttatcttcaaaaaatccattaaaaatatacagacacaggtagattaaaagattagaaatatagataggtatatataaatattaaaattgtaagaaagcaggagtggctatattaatattactcaagtcagacttcagaacaagaatatttaagagatgaagacagacattgcataattataattacaattgcaagtgatcaagaagatataacaatcttaactgcgtatgtaccccaaaatagggattaaaaatataggaagcaaaacctgacagatctgaaaggagagagataaaaaaatcgataaaacttagagtgatgacgaaaaaagagatgatatgtattgccaaaatcagaaatggaagaagggatggcactacagatgctatgggtaatacaaggataataatgaattattatgaatgattttatgccaataaatttgacagtatacacaaaataagcaaaaactcaagaagatacaaatgaccaaaactgactcaaaaaacatctgagtagttctatatctattaaattaaatgcataatttaaaaagcttcccacagagaaaatgccaagcccagatgacctcactagtgaattctatcagatatttagggaagaaatatctcacacaaattcttccagaaaaaagaggaggagggaacccttcccaattcatttttgaggctagcatcatcctgataccaaggcaaacaaacacattacaagaaaaactaaaccacagatgaatattgcacaagatcatagatgcaaaaattctcactaaaaattaggaaattgaatctatcaattgtataaaaagggacccagtgcggtttatcctaggaatgcaagttaggtttaacattaaaaaaaatcaaccagtattacttacaatatcaacagaataattaagttcatatgaacatctcaatagatgtaaaaaaaaaaactgacaaaattcgactcttagcaagtagaacagaagggaactttctcagcctgataaatggtatctatgaaaaactcatatttaacagcatactaatgtcaaaatactggatgctttctcgctagcatcagaaacaaggtaaaaatgtccccccccccccattcttattcagcactgtactgaaattcctagccagtactgaagggcaagataaggaaatataaggcataaaagttgaaaaggaagacataaaactctaactttatgcacacgatacaattgtctatgttgaaaatcctgaagaaactacaaaaactttctagaactaataagtaaattcagcaaggttacagaatacgagaccaatatataaaagtcaattatttctatatattaggaatgaaacattggaaaataaaaattttaaagcacatttacaaaagcatgaaaacatgaactagttaaagctaagtattttaaaaatacacataacctgcatgttggaaaataaaaaacattgctgggagaaggtaaagacctatataaatacagaaatataccattttcatggattggaacacaatattgttagaatgtcagttcttcccggccgggtgcagtggctcatgcctgtattacaggcaggtggattgcctgaagtcaggagttcgagaccagcctggtcaacatggtaaaaccccatctctactaaaaataaaaacttagccgggtgtggtggcaggcgcctgtaatcctagctactcaggaggctgaggcaggagaatcgcttgaacctggcaggcagaggttgcagtgagccgagatcactccatggcactccagcctgagtgacaagagtgagacttcatctccaaaaaaaaaaaaaaaaagaatgtcagttcttcccaaattgatctacagattgaatgtaatccaaatcaaagtcccagcaggcttttttctagaaattgacaggcggattccaaaatttatgtggatctagaatagctataattttgaaaaagaacaaaattggaggacttatgttacttgactttgagacttactataaagctgcagtattcaggatagcagcacaaggtcacctgaatggaacacagagttcagaaacagaaccacacatatggcaaactgattttcttttgagacggagtctcactctgtcgcccaagctggagtgcagtggcgcgatctcggctcactgcaagctcctcctcccgggttcacgccattctcctgcctcagactccccagtagctgggactacaggcacctgccaccacacctggctaatttttcgtatttttagcagagacgggatttcactctgttagccaggatggtctcaatctcctgacctggtgatccgcccacctcgacctcccaaagtgctgggattacaggtgtgagccacttcgcctggccggcaaactgattttcaacaaaagtaccaaggtaattcaatcaggaaaggatattcctttaaacaagagttgctggaataggccaactaggactcgccacaactcctacaggagtgacaggtgagaaccggacacaccttccgtatcctcacagtgttcctaatcagcacccctcaaacctgggctgatgacatccatgtttcctgggagcctgccaacacccgggttcctggatcctacctgtggtgacccaggctgggcagatggggccacagacagctttgggaagccctgcaccaggtcatgatgtctctgcagggcccccagaaactgaggctgtcctggttagaggagctggggagctgctaggacctccctgcagagcccaaacttgaggaaagctggagcctcagaaggaagggaggccactcgacacagtgatgacaaagggccatggccaggctgccccaaagtcctcccctccttgagcctcctggcctttccccgctcactacaaactgacttcctgcagtcacagtgggccctcaatttggcaaacagtgtagttcttgaacctgcgtgcgtcccatctcaggggccccacaccaaaccccagaaggatgctcacatacaatcttcactgccatttccaaagcaagaggaagtacggtgtggtcagcagaaagcacccggcccctgagggcaggcaagctgtagggcgtcccagtcactcacaggaccctgtggaggcagggatctcactgctgatggggagcctgggatccagaaaagagatggaactgagagacggtgagctgggaacagccccatcttccccgctgctccctgcccaggccactgcagccccatggttcagcttaggagtggagcctggagcctggaggggaagtctgggctgcagagctgagctgacagagggctctctaggcaggatgcctggttctttgctcagaccctgtccatctgcagaaccttaggtgaaccagggccccggtgtgctgatcttcataagatggagacaggaactgctccattacatacctggggtttcattaagattatgagccatgacaaagtcctcccagctctgcagtctcagaattacacgagatgagccaagtctcattcccggaagtcttacatggctgaaatagatgcaaaacaactcaaatatgggtttaaatggtcacgcatttgaattaacccatttatgcctagtgttccattattggaacactaagcttgtgggagttatttatatcctggtgttcaaggtcatcgccaaggtctgatttttcacaaaaaaatttgcaacctccagcataaatgggttaataatttatccaattaattaattttatccaaactaataatcaatctacgaggaccctaatctaaagaagtagccagagaaagatctgtgtggacagatgattgctgagatgctttgttacacagcgaaagataaatcaacaggtgagtaaataaaaagaggagctggctaaatgtcctacaacaaggaaatattttaagtaaattatggcacaactgcgaaatagcacattatgcaaccattaaacaccatcatcgaggaaatatttaattgagcgtaaaatgctcacgatatagtgtcgaagggacagagcaggaaacaaaacgatctgtcacagacccgacttcaccaggaaacagacatgaagatgtggggaggcagaggtggtgggaaggcagcagacacgacccgaggcccatggtgccccctcactccaggtgacgggtgatgagccactggcatcttctcctacatacttcattaagccatgaggaattctctatgcggatatgaggaacgctgtgattttggtcagcagtcctgtgtggctggtgccacggtagaagggtgatctgagccacaggcttgcccgtgtccttgggccccacagctggcgacctcccccacaccctctctaagggaccgagaatcactctgagcctccgcctgcttgaacctggcggtgggcagacaccgttcaccatgcacatccaccaggaaggtctgtggctggggccagggcacgagatgaggaggggcagccttgggagggcaaagctcaccttactgcaagtaccccaccctgggctggatgcccacaccccggggtgcctcgggaggcgagtgtgccgggcagagggcacctgggagatgttagcacacgcgaacatagtgcttggacatcctgaaccacagctgaagcaacaagatgggacgtgaagtcagcatgcgttgaaagcaactccactctcaattcaggggacccagagaggcaaattcaaattaagctgtctgtgtagacctcattgctccagcgggagatgggaaggcttcagaagagactgtgaatggccttgcctgcctgtcagggagggagggaaggggtgaggggcgcgcgggccgtgtttgacgttgctctggctggagtctcccagggactgctggggtggccttgtcagttaactacttcctatcagcaacacccgtggccacagggtcctgctcacctcctttcctcagccaggcctggagcgtgagcacctctgaggatgccacacacctgcacagggagcaagaaggctgctgggtgggcatgacatgggctccagccactgccctgccacaggcccgctgcatggcccctcgccccccttcccaccgctggggtccacacccaggcctgccctccatcaccagggcggccgtgactctgatcctgggtcggtgctgaggtgagaaggcactggcagttttgctcctttagaaatgtagagaactgaagtcttgagaaacaccaaaccctgcaccacaaacggccccaggaaccagctctttaacaccaaacctggtgtcacaaacgactccaggaaccagctccttatcaccaaacctcgtgccacaaacggccccaggaaccagctctttaacaccaaacctggtgtcacaaacgactccaggaaccagctccttattaccaaacctcgtgccacaaatggccccaggaaccagctctttaacagcaaacctggtgtcacaaacaattccaggaaccagctccttatcaccaaacctcgtgtcacaaacgactccaggaaccagttccttaacaacaaaccttgtgccacaaacggccccaggaacccaaactaccaaactgtgaatcacaaatgtccaccccttcccccaccatgagctccttaacacccgaatcctaattcacaaatgacccctggtatgtaggagctccttaacaccaaactgtgactcacaaacggccccggggatgagctccctttccagaggcagcagtctcttctgaatgcctggggccatgagtcatggggagggctgcccatgcccgcaggatgcccatttccatgggaatcagcccagctccccactggctgctgcctgaaggccaagctccagtgtcccggagaccctcgctgacttcagcttcagcaccaggggacggacaactccctgacctctcatgtctccaacctcctcaggcacaatccacacaaaacacttctgccctgtccagggcggcaaagagggtaccgtggctggggtcgcggggtccaaagcctgatttcacggaggccgaggcagagggtgcaggtccaggctcagagggcagtctgtgtgccccaggccgtattaaaaggaaggcaccatgtgtctctattacccagacagcttcaaaccagatgccaactcccagctccgagttccaggactcgaccggagcaggagcctcgagcgaagctgactctgacctgcagaccctgacacacggtcaggccagggagcctcctggatacccgggccaggggaatcgcgtgcagctgaaggaagcctggaggaggaaccgcaggccccgcgctgcacagtgcagagccagctggggactccccagcatctgaccgctccatcctcacaaccacgccagagcgagcagctcattcgagagagcatgtggccaacaggaggcagcactgggaccgcaagccagagttggcggctgggccagtctccacttggggcagggccagtggccaggagggacgcagccgaggcatgcacggtgtttggtggcacagccctgctcgcagctgccctggctgaagagacgtggccacccaccctcacacctgggcgcccaagagcatgcccctggccacccacccatggatctctggccatccaccagtgcacccctagccaccgacccacatgtccgggcagccaccagctcccctgcctctggcttgggaagcctgaggtgagccctggactcctgcagcctcagcgcctctggctgagttccaggcctcaatgctcttgaggagcaacgttgggtcaggggcctagccgggattccccaccacatggaggccctgaggccgtcctgctgaccttccctcagcccaaactcccattgcatcttcctgcctctcagcccaatcactgccgaactttatttctgttccaaaatgtcaccaggtctaagagacgaccgagagtggcctggtgagacagcccgagaggggctgggcagcaggggagttgtctgagtgggcggaggagaacccctggtcccacatgggaagactgtgtggagcggaccacgcctgcgccctgaggcccccagcccaggcctcctgtctgctgtcccacaggtcagagccctgggggcagcctgagccacagcagggaggccacagcgccctcagacgcaggcggggcaggccgtggggcaagggggcagagggcattctgcagcttggggcagctgctctggggacacagtgtggtggtgcgcacccctcacgtcgccctccgggaataggcaaagttcatctcagctttagaatcggggatcactgtgcatgaagttacccgtgttggtcaaaacccatacatgtgaatggtgagcacacttctccaacaacctaagtacttagtcatcaccactggacccaaggcggggacccaggagcagaggccctgtggtagagtcatagcaggacaggggaagagaaaggacctcgctgctccagcctcagagatggctccgggctcctgcatggacgcccccacacacagacactactttcaaggaactggtctcaggaaccactccctgcccagagctccacgaagggctgcctctcacatgccctctgcccacaccacagcgtccctctcgcgggtcctttgttctcggtctatccccaaaaaccctgtgtcccagctctgcctagagaaagatggagagggcttaacgagggctttgaagctcaaactcacagcagtgagcaccaggcagaggccagtgcactcagacaggagagaagtccagggggctgggctgcgggtgtgtgtgggccacaggggtgcggtcggaagggcagatttcaggcgaatgtgtgacacgtggagctgtcccacggtgggccgctgtagctcctgcttcctgagtggccctgcagggtacgggctcccaaatgtccggccttcaaccccccagttccgtccacctctggctaagagctgttgccatgacaaccccaaggtgcccactcacctggccccgtggctctgactgctgccccgtggagcagaggcagatccccgagggctcggcagcccggcgcccagagcctctccctgtctcggcccttccagtcctgtctctctccctccagcctggcccctaggccgggtgggcccactcctcaggaaaggaatgaggaaaatggagcagggcaggcagacaccccagcagggacccctgcccggcatctctggccccagccctgggggccacacgcctggcttcccattctatgcccccagcagcagctctgcctcctctcctccaccaggtcctactgcctccaccccacgaccgccccacctgggccctcaccagccctcgtccgcgtatcagggcagcctcatcccagcaacctgcagagacccgtgggcatgtttaccttctcgtcagcccagcagcactgtgagggccaggttcacttctgggcacctggcggcaagctctgggcctggaatggcacagggctagtcactgtctaaggggcttgtcctctgggggtaagtacccctccaagagcctggagtcctgagtcctgatctgtgcaagatcagtgcacgggagatggtgggctggcagatatgcccacttattcacaagcctgcttcagaaggaaagaacagggcagctaccaaggtcatgtctacacccgttggcagcaaagcggatgcttcatctgagagtgataaatcctgtgcaaatctcagcctgtgtcaacacgccccagctagacagcaggtcctcgattcatgagtcgacacctctgcatgggctcggtgacaagaatgggcggctgagtgggagagcacggtggcacgggcgggagagggcccacctggggctcgcacaccacactgtgtctgcaaacaggcgtgtgggcgtgtgcaggttctctgctctcaacacttccaggacagcaggggtcagcaggaccctgggccagcctggcaggaaggaaggcctgagcctgggcctgtgatctgggtgaccctgggcaggccctgctctgctggtgccagctgtggccaggcacatggcactgtgtgcagacaggcagagacctgctgcagggctggggcagcaggtgaggagtgagcacaggtctgtggccctagccctgcacccttcctggcccaggccagcagctccctggggacagttggggtgtgcagccggactccagaaggtggtgccgcaagctgcttctctcacacagtcctgccccgcaggttcctggtgagaaggcttcagggctgtcagtgaccgcatggcagcggcagggagaacaggaagaagactccacatctctttttctaacatggcgctttgcataccatgggccttcacagcccttgaaacactcactcaggctaggggggctccggctgggcccatgctgcctgacttgctttccctgcctcctctggatccagatcacagaagcaggtgccacatgggacgcctgggagagacagaggccaactgtgagcatgtgtgtgtgagcatgtgtatgtgggggtggctgtgcatgtgtgggcatgtgtgcatgcatgtgtgtatgtggctgcctgtgtgtgggcatgtgtgtgcatgcatgcgcatgcgtggctgcctgtgtacgtgtgagcatgcatgtgtgtgggtggctgtgcatgcgtgtacatgcatgtatgtggctgcctgtgcatgtgtgtgtgtgcatgcgtgcatgtggctgcctctgtgtgtgcgtgcacatgtgcatgcatgtggctgcccgtgtgggtgcatgtgtgcatgtatgtggctgcctgtgcgtgtgtgtctgcatgtggctgcctgtgcatgtgtgcaagcatgcgtgtatgtggctgcctgtgtgtgtgaccatgcatgcgtgtatgtggctgcctgtgcatgggcatgtgtgtgcatgcatgcatgtgggtgcctgtgcatgtgtgtgtgagcatgaatgcatgtgggtggctgtgcatgcataggcatgtgtgtgcatacatgcatgtatgtggcttcctgtgcatgtgtccatgtgtgcatgtggctgcctgtgtgtgtgcatgtgtgcatgtatgtggctgcctgtgtgtgtgtgcatgtgtgcatgtatgtggcgtcctgtgcgtgtgtgtgtgcacgtgtgtgtgcaagcatgcgtgtgtgtggctgcctgtgcatgtgtgtgcatgcatggctgcggctgcctgtgcacgtgtgtgtatgcacatgtgtatgtggctgcctatgcatgtgtgtgtgcatgcatgtgtgtatatggctgcctgtacgtgtgtgtgcatgcgtgagactgagcatgtgtgtgtgagccttcatccgtgtgggtggctgtgcatgcatgagcatgcatgttcatggggctgcctgtgcctgtgtgtgagcattgtgtgcatgtggctgcctgtgcatgtgtgtgcatgtgtgcagctgcctgtgcgtgtgtgcatgcatgtatgtggctgcctgtgcatgtgtgtgcatgcatgcatgtatgtggctgcctatgcatctgtatgcatgggtgcagctgcctgtgcatgtgtgtgcatgcatgcgtctatgtgactgcctatgtgtgtgtgtgcatgcgtgcggctgcctgtgcatgtgtgtgcatgcatgcgtgtatgtggctgcctatgcgtgtgtgtgcatgcgtgtggctgcctgtgcatgtgagcatgcatgtggctgcctgtacatgtgtgtgcacgcatgtatgtggctgcctgttcatgtgtgcatgcatgtatgtggctgcctgttcgtgtgtgtgcatgcgtgtgtggttgcctgtgcgtgtgtgtgagcatgcatgcatgtggctgtacatgtgagcatgcatgcgtgcatgtggctgcctatgcatgtgtgagcatgcatgcgtgcatgtggatgcctgtgtgtgcgcgcatgtgtgtatgtggctgtctgtgcatgtgtccatgcgtgtgtgtcgtgtgtggctgcccgtgcatgtgggtggctgtgcatgggtgggcatgtgtgagcatgcatgtgtgtgtgtggtttcatgtgtgtgtcagcatgcatgcatgtgggtggctgtgcatgcgtgggcatgtatttgtgtccatgtgtcagtgggagcgtgcatgatgccagtgcgagggcagggcctaggacacgagaggtcgacctgctcctcccgcaatcaccctgcagttctcactgatgagccatgaaagcttccatgatgcactcactgacctgcagatcctcgtggcctgatgtcggcagacagtggcagggatccactcagcgcaatgtggcaggcatacggggtccccaacgtgcctggcacttgcatacatactggccaaggtcactgtcaccacgacccttgggcagatgcgatgatcctggcccacataaaggaagacaaggcttgaggaggtgaagccatgtgtccaggtcccggggctggcagaggcaagcgacatccacaccaaggcagttctggcccgggtccagtccctcccaccacccgacgggggctgactagcagtgacaccgccaaagaccacctccattcagcaaacactcgggcaaggcctcagatgctgaggaggctgggggatggcgtggctggtgtgcccagaaaaggtggcatcctcacgggcactcttgccatttccctggcctctgtactgctagggtccctcaggaggaccccagcagctctggaccctaggccaggcccagcccaggggctccacagcagcccagctgcacatcctgaggcttgtcggggccaggcctgcaccggtggttctgaaaatgctctccccaagtggagctgcccctgcaccatctcctatgttccctgcaacgcagagagatgcttcacggaggcaacaggctcagccatgcggcctccgtaggctcacccagccaggctcttggagttacacgcttctttcccctgggctgactcatgcaggacctgggccacgtcccctctgcaggccggatgctgctgtcagctgagcctgccatgtttgtggcttggcccttcctcaccttctaagcaagcatggtggctccagacccagctaattccttcccctcaccccacccaggcagaggcccagccacccatgagactccaaagctcagagctggggggcctgctgccacagctcgtcaggggccacagcaacagctgggctctgggccccaggctggtggtgccctgaaggctgcccacccacagggctgtgaaggcagctgggaggtggagctgcctccactctcaagacacacaggacctgggccttcctggcccctctctatggcaagaatggggaatcatctcctgggaggggcatgtatccgtgggagggtctcactcctggaccacacgctctgtctggtgtgggtatggtgggctcggatccccgggagggtctcaccccaggaccacgtgttctggtgtgggtactgttggtacgtccctgacaagtctcatattgaaatgggatccccaatgttggaagtgtggcctatggggaggaggtgtctgcgtcatggggtcacaggcctcacccacagcctggtactgcctttgagggaattagtgaggtctctctctgtttccatgagagctggttgttagaaggagcctggcaccccacccctttggcctcctgccatgtgatctctgcccaagtgggcggttcctcttcatctcccgccatgagtggacgcagcctgagaccctcaccaggtgcacacgtgcccacttttgaacttagcagccaccagaattgtgagccaaatacactcctttttctctagaaaccacccagtctcagatattcctttatagcaacataacaggcaaagacaccaggcaagcccatcctgccagtttccacggaggcccaggctgtgccggccactacaggtatgtcggggagaggaggagggagccccgaaaccaaggccacctgtgctgttttatcagctctccatcgctcagcacctgagaaggggtgctcacgggccccactttgtccttggggagctgaggccagaagtcatttcccagggccaacctgctgtggtagaggagtctggaccctgtctgacgcccatgttctcatttttcctggggaggtgcacagccttcctgtctgggatttccacagtccatgcaacagtgagaatgcgggaccccagcaagatcagacagacgccagcagcgggctctgtgcgggacctcggcgggatcagacagacgccagaaagcgggctctgcgccacctccccttcccctgctgaggtccggcaggggcagcaaggatgggcagaggggaaaaaagggtgcacagaagcgacaccccgggccagcacaaggacgaggggtgcggggctatttcttcttcccaggaaggctgctatacaaaaacatttttctatagctgtaggatgtgcttgtgctttaagctaagtgttatacaaaacaaattttaataggctgggtgcggtggctcacgcctgtaatcccagcactttaggaggccgaggagggaggatcaccaggtcaggagattgagaccatcctggccaacatggtgaaaccccgtctctactaaaagtacaaaaaaattagctgggtgtggtggcgcacccctgtaatgccaggtactcaggaggctgagggaggagaatcgcttgaaccagggaggcagaggttgcagtgagccgaaatcgcgccactgcactccagcctggtgacagaacaagactctgtctcaaataaataaataaaattaaaaagtttataaactcaaaaagttacaacaaactttattcttattattattagagatgggatctcactctgtcacccaggctagagtgcggtggcgcgatcatagttttcaccgcagcctctaactcctggggctcaagtaattctcccgcctcagcctctggagtagctgggacgataagcaggcgccaccacgcctggctaagttttaaatattttgtagacacagggtcttgctatgttgccaaggctggttttgaactcctgggctcaagcgatccccccacttcagcctccccaaatgttaggattataggcacaggccactgtgcccagccattcatttattattgaagaaaagaacagtatttttaatagttgagtgtagcctaagtggtacggcatttatagtctccagttgtgcacactcatgtcctaggccttcacactcactcaccctcattcaccagctcgcccagagcacccgccagccctgcgagctccgttcacggtgagcaccctacgcaggtgcaccgtcttccacccttcatacatcatgtttatggcaccttttccatatttaaacacgtacagacacgcagatgcttagcactgcgccacggtggtctactgcattcagcacagtcacgcactgcacacttttgcagcttggcagcagccggctaaaccatgcggcccaagggtgcgggaggctgcacggcccaggctcgtacaagtcattctaggaagttcccgcaaagacaacactgcccaccagcacgttcctcagcatgcatccctgtcatctggcaaagcgagaccgtactagacttacacatatacacacaggtgagtgctgagtatcccttattggaaacgcttgggaccaagtgtctgggatttccagattttcaggttgtcagaatatctgtattacgtgcttactggttgagtaagcatctcatgcaaatattcatccctaatctgaaaatctggtatcggaaacgctccattaagcatttcctttgagtgacagacccacaataaaaaaagctgtggattttggaacattcccgacttcaggttttcgaatcggggaggctggacctgtatacctttccccctcatccatatgacaaacccggtaggtcgacatcgccacatgtttgtgcagttccggaatctgtgccgtccacgcctctggccctgacgcccaccctgcaggcctctgagccggggaaggccctggacagcaaggaatgaggagcctgctggaaccagtgtgtctcccagatcccagaagctcacggttttgccccaaactgcatttgctctgtgtccccggcctggtcactccacttcttcttaccactgattttctccctctcgtaacagaaggcttccttccctgggttttgagaagaggggaaaagggaggtggggaaaattccgtgagaaccactgggaggagtgcagccgggatggagagaccaggagctgagcctccccgctccaggcccaggcagagtatggccttcccaggaagctctagggactctggaatctctatcccctctcaggagggagaggagcagaggcagcaggttcccgctgggaagagctggagctgagatttgcctgcctttcccccaaacggcagcccaggcagccagctccctccacccacgcggcaacaagaggtttggtcccggctgggatgggaagtcctggctgggatgggaagtcctggctgggatgggaagcagagtggcgggggactgtgcggcaaaccctcaattatcccagcacacatctgtggaacccgcttgactggaaacggcttcggctatttctaactctgtctgcagccccctttctgcctgaagaatcatttgggggaaaatctgataaaataaatgacatggccaggaggctggggtttggcgagatctttcaggagcacgggagccacgtatgccagcccccaggtggagtgggtggggcagggggcctgtctccctgctctccctgccctcccacactggcctctgccctccgtggccctatctcaggagggtagctcagggaagaccctcctgggcacacctagtgatgctcagccccctgaggatgcctttctgaagccaggaggccagggtcagggcccccagggagcacccagaccacattcctcatgacagatggggaaactgagtctcacaggagtgcagtggcctggccaaggctgcacaccagggtcaggagctgcccgggacaaggtgactccacagtgtctcttatctctcctctggacagtggagaccagggccaccgctgcatggccccaaggagtcagtgaccatctgcaggcagaggtgccaacatgagccctggccctacaggttggctgttgtctgttcactgtttgtctcttcccttttgctccactgaaacctgtttttctgtctgtctggcagagccctagactgccctctccataagccaggccctgagctgggggcgtggagctgctgcgaacagtacaagtgcctctcctgtcaccaagcttggtgtcctggatacaaaggaggcaggaatgacaggtggatggggcaggactgatgctgatctcctggtcagagctcctgccagaagacttggcagctctagcgctgtcttcttggaacccaagggggaggatttctcaggaggccaacggcctcacccagtgaagggcagctcggaggaggacttgggaagagtcggcttacagggagcctttgaaagctccctaaatgttgcaggccctccagaaggtctgcagggaccaggacacacagggccggcagagctagtcacagctctgggagaagcacgggtgcaccgtgggctggagctgaaccagccaacagggatcccggtgcaacatgacccctccccagctccacaggtggcacttatgagacttgcctcttgcagcctccgaagtgagccacagttacttctactccacaggtgaggagactgaaacttggggaggtgaggctgcatgcccagtgtcagccctcatgaacatgctctaaaggcccatatccagcaggcgatccctccacatcaaccagatggggcgcaggaaggtctgggaggccccagccctccaaagaggggagggggcgagcggggtgctaggcacagctgctagcagggcacatcagctgggcaggacagagtctggaggaggagtgggagagggaggaggaagagcaggagtagagggtgggggttgggtgaggctgggggaaagaggctgtgaaaagaagcctagggagaaatggagcaagaagcatctttaagaaccaggcacccagcagtgggggagaaacacaggaggggcacacttaggccccctggggaccctcaagggacaacgaacccaacaggataaaacctccggcagactcgcctgtcaggaaaaacacaaggtggcacgtgtcctaggagggaagccagcggaagaagggtcccacatctggggaacccaggagggcttcctggagaaggtgtctacaagcgagctgggcccaggtgaagaggatggagcaggtgggccttgatgctggggttccagggaaaaccgcagacacaagttggcagcttcttcctgcggggacttcactgctcagaaatgaaaccgatggaccaaggtggggtcttggcaaccatgatggatgtgccaggaacatggccccacttactcctgtgggtcagacgtaactgtacctgctttacagatgaggcagaggcccagccagcacccccctggcaacagctgcacttgggcaccagcccacaagctcacctagagtcagccccctgcctgggttgcccagagctccccatgccaggcccaccccgcagctctcagccccgcctgcaaacatcaacttgtaaagcccttccatactttacttaatctccctgatcctgtgagcttcaagcatgaaaacacagtgcatgtcacacatggggaaagtgggtaagctaaaagcaacctcgttccctgacactgtccacctgagccagcccccggaacacggcccagagcaggcatggtgggtggccggaagggtggggagcggggcctctgcgggcaccaggccttgctggtggagcactgggccagtggaccgtctgtccttccggaggcggctgcctcagctccatggcttctgacccagcacatccagccctcaggacctgcaaagtcacattcacacgggccttgggccaggacaggccgtggtccagaaggtcaggtcaggccaggcctgccactggaaagaagggacagcaagggctggaggatgggcagtgagggggcggcctggggaggcgccaaggctccagatcacaagagtctaggaaggcgggcaggatgcctggcaagagctgcggggcccaggccagacccctgcaggaaccacggctcctcagggcgagcccggcctcccgtacgctgtgtgtcctttaggcctggggcgagcagggctggggagctggccagctcctgggctctctgtccgcctgcctcctcctcctggggcccccttcctgcctctccctgacctcaggagcctgggggctgagagggctccaaggcggaaaggagggcaggggttcctgcccaggccatgggggctgaaagtccggccactggcaagctgaggccagcccaagccttctggtctcaacatcctgccatggctgggatcctgggcgggcggatgagggccgggggagctgagatgctggctcgagcaggaagagcggcagggcccatgctcgagggtatgacggggatggacctggtgtccagcaaacctgaggacattgggcagggctgcgcttcagaagcccatgcagggcttacagtggtcaagatgctacttgctgacggtgtttttaaaaagtgacacaggagcacacacaatggaaccccaggatcccgagttcccaggtgtaaatgaacatgcctaggcatgtgcctacgtatgaaacaccgaaaggaaacacggcgaagcaggacagcggccacctttcgcgggaagatgacgagtggcttgcttccctcttttggattttcgacactctcaacagaaaacactgtggagggtgccccaaggttccgctgcagttagtcttcctaagattcgcttcaactacagcacacgcagggatccggggaaaacgctgcctcttaatttgtaaatgttgatgtaacgagtgatatgttaagtgataactgttcatggtacacctttattaatacctaatcattttagaaacctatggaattcgtataatgcattaaacacctctgtgaattattcaaagtatacagaattatacaaaagcgaagaagtacatttctgatagcttaaagacttggtgtgtttttattattcaaaggtttgagagtttcaagagtgtagaaatggatgactgtgatctgagaagcaggaaatccacaaggaacgcagagcaagcccggcacggtgcccccgtgcagcgcaggctgtgaagacgggcgggttgtgcagaaggaggaggaagagccgggctaaggctgaatcagacaggcagcggctcaccgctgtgagacgctgacggacatgcgtaggccgcactgggtacagcttttatacaaatcaaagttggttctcggttccataaagacacgcagaggctgcagactgcaggcagtttagacgcccgttccagaccacagcagtcccaggtggggcccgtctctgcctgtcctcatctcccacagccaccgccccctccacccttcctgaagcagccacatgccaagacggggccacgaggtcatgccggggccacaatgccacaccaggccgacggcaccatcctcacaaaccggaggttagctcaccggggcagtgatgaacaagcccctgttgccctgggtctccagctgctggaggtccaagtggggccacctccaccctgagggtcaacacataacaccccaatttctgctgttggaccccgctcgcccgaggactcttcatgtccacaacggtggacccagtctggcttcaccagcaaaccagaagagcgcctgctggctcgcaggacgcgagtgtagagatgcggctggctctcctttcctcttctagtctgtctaccttgccctgtgctggcttctgggactgcgctgtcccactgcgcagcctggcatcttggaaggcgtcccctgccccggccccacacggacttcagtcctccccaggcaccactgcctctggacacactgacacacacgcctacggccgcagccctcatggaacgaagcccaagttgcgacagacagaggctgagaaagtcagggggacagcctagggtcttctgcacccaggaggtccagggctgcaaagccacatagggttggcccaaggctgagaagcctcagggggtgacgaggacgggccagtgcacctccttcccgcccagccctccacaccatcccctttggacgcgaggctgctcctttgctgagggctacggtcggatctccccacaggaggagacagagagcgagacagccggagagccgtcacacgcaggacccaccttgaagatgaggcagtcgcctgggtgctcggcgtacagcgaggtcagccggtactggttctccgtggtgatgtcgatctggtagccggtgagcgtgtagcaggccttgcggaactcctggatcttggtctggaaaacctccttgagccgctggttcttcagctcggcactctccacctgcttcttcagctctgcgggagggacggaaggagacagtgagtgcggcaccaggccggaggggtggggacccgggagcggccagggcagggaggaagccgagtacaggtgggagtggcggctgcccagggacacagcaagcccccgtgtcacaccagccagcctccatcggcatgcatgagggaacgggagtgaggggtgagctgataacggctgaccctctggtggtggcaataataaagttactgcattaagaacggtaactctgagagccagactacaagcagccagggcccctccacagggatcagccctcggcctgcagaatgacaacccctggagccagcacagtcactgccaggaagccacagggtcaggaagccacagggtcaggcgtgactcggggttcgcttgccccaacactccggggatttaggcgagaaccgcgtgaggagccggtgctgaggatgtgggtcccaaagcgaaggcctgggctgccacgccacccagtgatcctgaccatccattcccaggttgccgcctgggtcctttctgaggctggacgcctaccccacaggagccagcaccgacaaacagggaggcaggcaggaggccaccgggacgttccggatcctactgccccggggctttacctgccagccacctctgaggtcaggccatcgtgagacgacagccggcacccccaggcccactgcccctgacatggctctaagtgactattcagggtacagccccacaccctgcccgtcagagtttacggctgcttggggaggaactgctctgcagagccatcaggaggataacagcgattatcatgaatttctcacccgagaggccttccaagtagttaaacctcgatttatccccgcgttaattatcaggactggctccacttagacgcacacagagccgtcccctaggccgggtgcttcccagcagtgctgtctggagctggcaatggggagccctccaggggcctgggactgctccaggcggggacgggagcctgctggaccctatcctgcaggccacgggagctgggccagctgctagcctccctccactatgacgagggactgaatcacaggactgctgtaggcgcccacaaccaggcacgggatggtcagctccctggctaggctgagaaagaggatgttaaagtcaaccatggccatatggttggagagaacaagggttccaactccaggcagcgcccggggggaggctggtcctgagttagagatgagtctgaaggccccagaaagggtgtggggtcccccacagtccactctaggggagtgtgaggaaaggtgcagtgtgagtgcctgctggccaggtcacagtgagtgagagaggggctgccggggagtttgtgcacagcggcccgaagaggctctgatgggccagtttaaggtggacgatgcagtccaggttgcttcctggaggtgagcagggacaggggagccaggtgcaaaccagaagccctcaagtctgcagaggaagatggaggacgcgggaggggccgcggtttcagctcggctctgcctccctgacctgtgactctgaacctaccccttcaccccatctcccaggacttctgcctgcaacacggacacaggcaggcagctgccttcagaggtgttaggccagatcacgtgccggaggccaccgccgagagcgcagggccgctgggcacccccgatggcgtgagctcagtcgagcagcccgttccgagtgcaagctcactcactgcctggctatgacagctatgaacacgatccgatccccaatccacacacaatgacacccaggctcacagagactcgctgcttagctgcaaaagcaagggcgctgcctgccatgggttctggaaggagcagcggtgcagggaccacgttagcagcatccagatgtcaggggctgggaggatatggggcctgtacaaccgcaggcctgtcagcagaggggccctggcgcccatccacctgtgggatggcagcattggcactgattcagccctcgccccaacctggcctcctccctccgttgctggcaaagacggccctgggggacactgttattccacggcccagcccctccagcaggacgaggctggggcccttgatgaatcgagcaatcaggctgtgaaatctgaaggctaattggcagctctgaccccaagactcttccctgcgtccctcggctgatcctcccgaagatggggctatcggtagcaggaattgccacgtgcacaaggaagaacgcagagaccacatttcagaggccatatttcaccctaacatggcccgtgctgcctttgatagatctcaggcgtccaaaggggaagaattagattttggtaataaatgcaagcctgaccttggagaaggaaacagccctgttttccgatagacttcaaagctgcctgtgccgctcacagacctctggaagttccggggctccaggctgtgtttgcccacccatagcaggttggtatgaggtcccagggcgaggaaggcagtgtgtggggccccctctcagaggcgagaccaccacccatgcggctgggagcagcatgggccgccgcactcactcctggggccactctctcaccctctgacagacaaacccagggccctggaggggaagggtccatcctccatgccacacagaccctcggaggtgagggggccctgatcctggtctcctgtccacgtagggaagggtccatcctccagacaaggctgcctcgacggagtcggttcagtttggggcagatcaagccagcgttctgacccccctttatccctgtagttcagtggcttacatcaacgtgaatgaataattcacacgatggtttggattaaataaataaaagatgggttttccgccttggaaatgtcattgctttcttgtcggttgctctcacgtggtctcctcccaagtgagccaagagcccggggttcctctggactgggttctatgggcctggatcctgggcaggctcctctcagagaccccagaagccagtggcagagacccccagggtgagaggcgacagccctgtgcccgaccccagccctgggaccacataggcactgcccaggctgttctcaggcccgacctgcaacagcagtgcatgggctgaggcgagacagtggtgcagccttcagcgctcccatcccctgcccagcccggctcgctgtgtgctcaaggcctgctgggccaggggtgctcagggagggagcccagctctgcagccctgctctctggggtggcctcaccaaggcttttaggccctctccgctgacctccagggctaccccaggcttagagccaaaccgtagggaggccttgagcccagcccacccacagccctggctcctgccttccctgcccggggatgttgaactctggccacactgaccaggagcacctgcctaggaagcagcaactcccctctgcctagataccggccctcctcgggcccctcctccacacccctgggacccctgctttgggcagaaccggccctcttagaggtacctgctaccaccttgcagggatgcagggacacaggcctggtactgatgggctctcaaggcctcggtgaggggcaagagaggaggaagaacagcaggtgttcaagtgggagtcagagaggatgcagcggcggctgcccagggcccggcccagtggggtgtaccagggggctgaaggcatccacgacactggtgcctgaacagccaccccctcaccaccttagccccacacctgcctcctcctggaatcacaggaggcagctgtgaagaggacagaataaaaataaattgtgctccattaggtaaaggctagctagcaggaaagagaggctttacagtactgagggccgggatgtcaggataaaggagcatttacagcacttatctcaagaggcccagttcacagcctgaaacgcagaaaatgcttctaccttggcagggcagggagagccagcacacagctgtgacccacggggatagggacagagatgccggggcccaggcctttcagaaggagggaaaaggaaaacgcggtacttttctctacatcctctttactccttcgagtgttacggggcacacgcagatgagagcaagcagagaaccttttaaaggtaccgacggatcttaggagtgcagccccagggcactgcctgtccacttccgcccttccccggggcctgagctatacccacgcagaaccaggtcggccgggctacgtgagcctcagggtgcagggaaccgtctcaggctccagcctcgctgtacgtcctgcagtgggaaggaggacccagcagcaggcaccgttccagaaagcaaggacgcagtggcctacggaagacgatcttgcggaactcatgattgatgaagcactgttccaggcagcaaggatgcagtggcctatggaagacgctcttgcggaactcatgattgatgaagcactgttccaggcagcgaggatgcagtggcctatggaagacgttcttgtggaactcatgattgatgaagcactgttccaggcaagcgaggacccagtggcctacagaagacgctcttgcggaactcatgattgatgaagcactgttccaggcagcgagaatgcagtggcctatggaagacactcttgtggaattcatgattaatgaagcactgttccaggcagcgaggacgcagtggcctatggaagacgctcttgcggaactcatgattgatccagcactgttccaggcagcaagcacacggtggcctattgaagacgctcctgcggaactcatgattgatgaagcactgttccaggcagtgaggacgcagtggcctacggaagacactcttgcggaattcatgattgatgaagcactgttccaggcagcgaggacgcagtggcctacggaagacactcttgcggaactcatgattgatgaagcactgttccaggcagcgaggacacagtggcctatggaagacgttcttgcggaactcatgattgatgaagcactgttccaggcagcgaggatgcagtgggctactgaagacgctcttgcggaactcaagattgatcaagcactgttccaggcagcgaggacgcagtggcctatggaagacgctcttgcagaattcatgattgatgaagcactgttccaggcagcgagcacgcagtggcctattgaagaagctcttgcagaactcatgattgatgaagcactgttccaggcagtgaggacgcagtggcctatggaagacgctcttgcggaactcatgattgatgaagcactgctccaggcagcaaggatgcagtggcctatggaagacgctcttgcagaattcatgattgatgaagcactgttccaggcagtgaggacacagtggcctatgaaagatgctcttgcagaactcataattgatcaagcactgttccaggcagcgaggacgcagtggcctatggaagatgctcttgcggaactcatgattgatcaagcactgttccaggcagcgaggacgcagtggcctacggaagacactcttgcggaactcatgattgatgaagcactgttccaggcagcgaggacgcagtggcctatggaagacgttcttgtggaactcatgattgatgaagcactgttccaggcagcgaggatgcagtggcctactgaagacgctcttgcggaactcaagattgatcaagcactgttccaggcagcgaggacgcagtggcctatggaagacgctcttgcagaattcatgattaatgaagcactgttccaggcagcgagcacgcagtggcctattgaagaagctcttgcggaactcatgattgatgaagcactgttccaggcagtgaggacgcagtggcctatggaagacgctcttgcggaactcatgattgatgaagcactgctccaggcagcaaggatgcagtggcctatggaagacgctcttgcagaattcatgattgatgaagcactgttccaggcagtgaggacacagtggcctatgaaagatgctcttgcggaactcataattgatcaagcactgttccaggcagcgaggacgcagtggcctatggaagatgctcttgcggaactcatgattgatcaagcactgttccaggcagcgaggacgcagtggcctacggaagacgctcttgcagaattcatgattaatgaagcattgttccaggcagcgaggatgcagtggcctatggaagacgctcttgcggaattcatgattaatgaagcactgttccaggcagcgaggacgcagtggcctatggaagacgctcttgcggaactcatgattgatcaatcactgttccaggcagcaagcacgcagtggcctattgaagacgctcctgcggaactcatgattgatcaagcactgttccaggcaagcgaggacgcagtggcctatggaagacgctcttgcagaactcatgattgatgaagcactgttccaggcagcaaggatgcagtcgcctatggaagacgttcttgtggaactcatgattgatgaagcactattccaggcagcaaggacacagtggcctacggaagacgctcttgaggaactcatgattgataaagcactgttccaggcagcaaggatgcagtggcctatggaagacgttcttgtggaactcatgattgatgaagcactgttccaggcagcgaggacgcagtggcctacggaagacgctctcgcggaattcatgattgatgaagcactgttccaggcagtgaggacgcagtggcctacggaagacgctcttgcggaattcatgattgatgaagcactgttccaggcagcgaggacgcagtggcctacggaagacgctcttgcggaactcatgattgataaagcactgttccaggcagcaaggatgcagtggcctatggaagacgttcttgtggaactcatgattgataaagcactgttccaggcagcgaggatgcagtggcctacggaagacgctcttgtggaactcatgattgatgaagcactgttccaggcagcaagcacgcagtggcctatggaagacgctcttgcggaactcatgattgatgaagcactgttccaggcagcgaggacacagtggcctatggaagacgctcttgtggaactcatgattgatgaagcactgttccaggcagcgaggacgcagtagcctatggaagatgctcttgtggaattcatgattggtgaagcactgttccaggtgcttggaatagctctgtgggcctgggctctgtgacctccctctgggacctctcccgtgagtgaggccggcctgacccccatctgtgtcctgggatgattttaagaggaacctggggctgggcacagtggctcacacctgtaatcccagcactctgggaggccaaagcaggcagattatctgaggtcaggagttcaagaccatcctggccaacatggtgaaaccctgtctctaccaaaaatacaaaaattagccggacgtggtggcgcacatctgtaatcccagctactcgggaggctgaggcaggagaattgcttgagcccagtaagcagaggctgcagtgagccgagattgcgccactgcactccacgctgggtgacacagtaagactccatctcaaaaaaaaaaaaaaaaaaaaaaagagccggggcctagctgtttaccaagcacccgcaggcaccaggcagcactgccctgaggagaccagcccctgcacagctgaggcagctggcccacgtgggaagaccccacaggaggaagagacgccagccctggtgcttctgtagggtccccgaaccccaagcagcctcttcccaggctggcctcggttgtgtatgccaacaccgctcctgctaccccgtccaggataaccccggccatgcagacagatctccatgctcccacagcaagacttgagctgaggcagggctctctcctgggatattcatgccctgctgggtgccccggcctggctgccactgcagctgcatctggccctagcctgacctggtcccagccccgccccagggccctgagccaccctccctttccagctgcctctcctgcaccctgcttctccatcgctccagtctctggctcctgttctccgcatgctcttttcctgcagggcacagattgtggcgtccacagagctgtttgagatgcctgggcctcacgctctttccctgcagtgcaactgggcctcatgctgtttccctgcggcgcaccctgagctcaggtgggctgggccaggcctgtgcgcactgtcacacctgccctgcacctgagaacccggaacatggaagtgcgcgacgggtgcgtgttgaacacgcaggtgagcgaagccaccatcccctacagacctgagctcctgcccctgcgcaagctacacagtcagcttaaccacaagcaagcacacacacagcggacgggacacacacgcctactgctgaacgtccgtttatccccgaacacgtgtgcgtctgtccctgaacacccgtgttcatccctgaacatacagccttcccatggcctcagatgaaaagcccttaaaatcaaggcaggccgaagagaggccatgccactgccccgcccccaagcccccaaccccatccctgctgtggctaacagggtcactgtgagagccaggggcctccaggggcttcagcctgcgaggggcggtgagggcacccatggcctcagagcagctcccagctgctcagcccttgccacgcccccatccccactatctccccactgccaccgccttgcccctgtcccacggtcccccagctcctgcccgacctggaccggtgccccagtgaggagctggcctgggtctgggccctgcacagctgccaccgaggaccccaagccccagactctgcagcaactctcgatttagggactggaggcagcttcggaacttttccttcagggactcacggcacagccatttttctttctaaacaatgaatcaaatacagttaaccaatgttgggattttcaggctttaaaaaacccacaaaaagggactaatatttcaccattaaacaaggcagcccctgaggcccaggccaagccaggaggacaatcctactcggcgtaggcccggccccactgatgacgccgccacggggccaggaggaagggagtgattccaggctccatacactgcctgtgcgttcacggacaagtcacctcatctctctaagccccctttcctccctgggtgtggcaggagtgggggaaacatcacctgcccccgggtcagtgagacagtggaggcgaaaaccctctcggcaataacgtgttcctcttaataaaacacatccctgtgtcgtcaacaaccacttggctgtctacggacatcacgggtgctcggcgcgggatctgagtggcgggcctgagtccaggtgtggagtgagggggcagtgcggtctgggccgcaaggacacccaaaagatcacctgagcatggtccggagagacagggtgaccgccctggcccctgcagtgtgcggccccctcaggagacagcggcccgtgaccccagagctcaggagtccggccagggccaccctgcaagggtgagatgaaggctcttagcagacatgggtgaccagacagtacgtttgcccacacacggtcccaacgatgtagcacagcctgggcacagcacctttcccagctcaaaggttgggattccagcatgacaggcccagcaagtctgtccaggctgctgcagctggaactggggaccacctggctcagggctgcagctgccccgcaactctcgcgatcatacccttcagcaggtccctgatgacgtgagacagggaacaatgtctggaaccctgcatggctgaagacatctctacctcaccatcagagctgatgggtaatttggccagatgcagaattccaggctgtatacactcctccttcagttgtgtttgttttgttttttgagacagggtctcactctgtcacccaggctggagtgcagtggcgcgatcgtggctcactgtagcctcgaactccggggctcaagcaatcctcccacctcagcttcccaagtagctgggaccacagggagcacaccaccacactgggctaatatatatatttttagggtctttctatgttgcccaggctgttgttgacctgcgggcctcatgtgtgcctcccacagtgttgggatgacgggtgtgagccccgcacccggcctctctttcagtgctgaaggcatcgccctcaggtctcaagtgctcagcactgctgtggagaagcctgaatccgttctgacttctggtcttctacaagtgactggttctcactccccggaagtagcagagccgtgtctctgttctcaacattatgaaactcccccagcatgcatttctctcatgacccccaccacacggcctggctcccccaagtgtctatttcccacctctcgttagatgtctccctggcggcggctgggcgcctggcatgagcagcggccccagggggtcctgctggactgtttctgggaggctgccagcattggcatctccagatcttccctctaggatgggtctgatgggtcagagatgactctcagatgctcagtgccagtgggaacacagggcaggagggaacgtgcccagactcggagcagcgggaccagcctctgaaggagcccgacaccggcgtggtgtactagtaggtgacgcagaggcctccacatcaggccgaggtctgacctcgacgagagacgaccaaggatcccctgcacgctgcggacacaggaagccagtggaggcccagggctgggggagccgcccgagtgtccctgcagagagtactctgggccctggcaggcactggcagccccggtcctgcccaggcccaatgccgagccaggcttcccgggactgaattattcatgttttgcaagcttctaaactatttcagttttacatttttaaatatttaataattaggcatcaaatattgatgcaattttattagcagccatgggcatggggcattgcagtggttatggctgtgcgatttgtatccgggtcctggctggctctgcaagagactgtaggaggtggggacgcacctgtaggctggccgggaccccccgggatgtcacccgtgagaaccgtaccccagcatgccccacagcgccccacctggctcatcccaggggctgccggccccaaatccaaattcccggagaccagcccgaggggctggcaggcatcatggtccccaggaactggctttggcaacaggaggatgggacgccaccacctgccagccagggcctgctgctgccccaagaagatggtcgcttcaactctgctggtaccagacggcccttgagacacggcctccatgatgagccatgagttcccctgctgggcagaaactgcacactctgctccagtgagaagacactcgccctggaattacacacggaggagccgctccctggcccaccacctggcaggcgctggctgggtgagctctgtgcagctttcaaacagggcacctcttgtgtgattaacgacttactccagcaagcagcttgtcaccttgcacaaaactgatatgaaaagacaccagcaattacagccaccagattacggggtgggagagtcctggggtgacaggcgggcgcggatatcatatttggagaagaatcctcccccagcaccgagaacacagcagctgaaccccaagggacagccccctcccccggcaccaggctccacagcccccatggggtccttcggcagcagaggcccagcggaaccttggcggaaggagggacattggcccccgtgtcagtgatcctccggacaccctgcatatgtggggggacgtggcacctgctgaatggacagaaagatgcctgcaggaggccagaatccagctccacggtctctggccagcaacaggactacagggagggctggtcgcagcagccgtccgacgcgtcagcacagggccacctctgcgatgccagcactgttgaggggaccccttgaacacccgccgcggagccaaagctggagcccacgctgggcactgccctgggggctgagcagctgtctccattggtcattcaggcttcagttcagaaaagcctccctgggccacccccaccagtggtcttctgggcaccccacatttgctttctccctagagctcacgagcatctgagatcgcgtgtttgcccgtgtcctggcctctcttccacctggaacacgttcgtcaggtgagagcctgctcgggctttgagtaggtgcctgtccggggcaggaacacgcagcctcgctgcacccatcccagccgggccccgccctggggagcatggctacgtttgtccccaccttctggatggggaaaccgacgatgagaaagcagggagagggctccctgtgacgccagtcaggcgggacatgggctccagcatggcgatgtggggccacagtgtctctctcctgacccccaaccctgcacccatcccgtgaccggaggccctggcggggcctggtctgggcgcatcagtcctttcaagtggcctcagctgcctgtgcccacagccctgattagccgtgaggattcataactgcaggcgtgcctcatgtctaagtgctactcccacagttcccgctcctgggcggccgcctctccctccatcccccgcaccccttgagccagacaacttgagttgccttcggccttcctggattcagcactcaacacccgctggacaccaggtttcaacgctctgtcctcaccaaccctccctggcaccacctctgctcggggtctttctttactagagtccaaattctacttcctgtcaccctcctctccctcctcctcaggccccaggggtctttcttttgacgcagagcccagcttcggaaggggagcactgcccccggcgcagtcacttgcagagtcagagcccagcttcggaagggaagcgccattgcccagcacagtcactcgtgtgcagcccaggtgttctgtcctctgccgctacaagtccacagtcctcccagacaccccaggcacactcagaacgcatggtgctcatttctgctgccacaatgtggcgggcacatttgccttctgccaggggacgatgttcaccagcgaacttctgcaaggccagactccggcgtcacctccagatgaggcccctcttgggcatcccaaccctctccagtccggcgtcacctccagaacaggcccctcttgggcatcccaaccgtctccagtctggcgtcacctccagatgaggcccctcttgggcatcccaaccctctccagtccggcgtcacctccagatgaagcccctcttgggcatcctatccctctcccctggactgggtctgaacctctgcggcacacacacgcctttccagctgcggccacctttgcagggctgcttccctcactgtgtgagctgcctgaaggcaggggctgggcctcacctgtccaacccgccctccatgcagctgcagggcagaagtggtgggagtgggctgggttccacatcccctcagacacttgtcgggggtctgggggctgacgggaaccatggccaaacccagaagtctgcaggagtacacatagctgtcgggatagtttccttctgacccaaaatcctgaagtgggggaaactggggtggcaggggtccagatggcggcaggggccctgcgtgcgggtacagaccccagaaccagccagctccgtgtgtgtcagcagtggaaaccgcaaggccagccctgtcgactggatgaaggatggccatctgagagacagacagcaaatgggggcatgtgtggctcaaaaggaaaacttaacctatccttttggggaacatgagctgagaaactctggtaaaaggaagcagttggggtcagaggtgactcctcctgtttgggtgaggtgaggcaggcggcaggtgtgggcaccaggagagataagaatgggtggccactgcagagactgcaggccctgcacggagatgccagcccacagagggcaaggggtgcccatcctctcacggctcctcctggcacaggcagggctgcggtccctgccgccgatgcatcagagccaccgggaccctgtgctccccatccctgcaccagtgggggaacggtcctcagagcactcccctctcatcccaccagctccaggcagacccagcctcacaggcccacagccagggcccctgtgcaggcagggagcccaccgcgcacgcacctcccagagccagaaacactccagagggagcagtgccccacagcgatatcacagccgagtcaagacgtgaccacagaacacggccacctcatctgtttccggaagcttccctccaggaacatgcccagcagctggtccgtggagagaggcctggggtggcggcggcgaggtcctgggagacgtgggggcggggctgtgtgggctccggccgctttgcatgccgcgttcatgattaatttcccaccgaggcttgcagaacctcagctccccggcaggcgagccccctctgagaagagggaagcctttccagagctcatcttttattgactgggtcattttcgagtcaatctgtctgctttcggcaagacgagagttttaaatctcctgtctcttttccccttttggagatgtggcagtctatgaaaacctgctaatgtaggcagcgaggcctcggattcctatgtaatgaactcttcagatagcaggagactcgggaagaggacacggaactgctccagtaattggagcagccagacacagggctctggaaggagaggggcaaggagcagggttctgggcggggtgggtgcagggaggacccctgagtgctgaggagcactccacccggaggaagcggcctggggtggcgtggggtgggggatccatcagggcagacgggctctgcatgaggaggaatccgcgcgtgcacgcccggcctggagaagggaaccgtcgggggaggctctctgaggccaaaggctttaccttctgggagctgtagcggcagccaggccccttgctcccccaggtcctggagatggccctggcgtcctgggggttggcgtggggtcagcaacctgggacctcgcaggggctctggctctagaagtggcggggagggggagccctcggctgacaccatgaggatttcatgatttacagctgctatggggggagggagagcagcccccagtggcctctcccccaggacaaagctgaggctgagagggaagcagctggtcggggacacagcagagccactggggctgcaatgcaggccgtccggattccgtggggagtggaggggaggctccctggctgcctccgccatacagacttcacccctatgggaagaatcctgcaggaaacgccacagactcagtcatgccccctcacagttcctcctgggccctgcttggagtcctgggtggccacgctggagggaacgccccatgtcctgctggacgccatgctggggggggagagggtagacaagctcccagggcagcgtgggcaggtctccccccccagcacgcctgtccacctctcctctcctgcaagcccaggcaccgcgtccaggtcccaggcccgaccccacaatgggggacatactctccactctgccacacgccctcactggctcttcccagccccctcccctggccagtgctggcctggaggcctcaggacctgggagtcggaaggaggagatggcgctgtgatgggtggcaggagaccagacaggcatcagcaagcggtggctatgcctgggcccaggaccgcacgtgggaagggactctgcagatgtgtccggggcagggatggtgagaccacgggcgttcctgcattatcctggtggcccgctacaatcacgcgggtcttcacacgtcagaaagggaggcaggaaagtcggctagagatccgaagatgtgcgctccggctctgagggtggaggaaaggccgtgtgccaaggcacgtgggtgcttctgggagccagaaaaggccggatgtggattctccccagagcctctgaaacgaaccggccctgatgacccctggcctttagcccagggaaacgtgtgacttccagaacccgagatcacatcgtgttgagtttttggtttgtttttttgagacgaggtctcactatgttgcccagggtagcgaacaggggtgcgatcacagctcactgtggccttgacctcccaggcccaagccattgtcctgcctcagcctccagagtagctgggattacaggcaggtgctaccacacccggctaattattattattatttttataaatagggtcttgctatgctgcccaggctggtctccaaccgagcctctggcaatcccctgtacctgggcctcccaaagcgttgggatgacaggcatgagtgccgcgccggccctgctgtgttgagtaactcagtcagtgctggtttgtcatggcagcaacaggagcctcatgcggtggcatctaaggatagtgtgggcctctggttttccagagccgagccctccctgctgggccacagagcagcaggaactggggtctcactgggagcaaccctggtgccagggtcctcagaagcgctgctcagctattcattcacccagcaggtatgtgtggagaggtgctgggcgcctggtaacaccccaggccctgaggacacagtgtgtatggagagatgaaccccctgccctaatggatgttgcttttcaactagggaaacagataaaaaataaacgaagtgcaacagtagcaccttggagcggaagtgctacagagaaccgcagccgggagggacggggagatgggagggggagggctgcggtccgaaaaggcgtcctggcagcacctggctgggaaggagacctggggcagacttaggggaaaagccacgcgcttcccgggacagaaagctgcagggccaggggacggcgcaggcagaggtgctgaggacggtcaggggcagcgaggaacgccacaggaggccgacgcgggacgtacgtggagcggtgttccacggcgggctggaggacgcacgctgcctgcctccaagtctcacagtcaaggaaggaccgatggtcggctgcgtgggactgctgcgggtacaagcaaatgtgtcgccggcacagaagacagccaggacgaaatgttcagcgttgagtgcttttcaaaaagcaagtgaaagcaactccacggggaaagaaaagtcttttccgccagcggggccaaaacgacccaatgtccacacggagacagtgagatgtggacctcccctcacgccacgaacagaaccagcgggataaggggcttagtctaaggtcgattcaacactggggtcagcagggaattcttgggacaaagcactaccaccatcactaccacaggaaaaagtgattcgttatacttcatcgagatttaaaactgcttatcaaaagaaagcattgagaaaatgatgagaacacaatccagtcgaaaatggcagggatttaagtaggtattttgcagaagatgacctaggagaggctaacaagccacgtcggtgcccatcatcctcacctgtgaggaagtgcaggcatccccacacactccgcacccaccagtggggctgtggtcagaaagagagatgccaccaacaccgggagggtgtggggcccctggagcctcacgtgggacatgcaaacgggtgaagccgcctcggaaaccgtaaggcagctcctctcctccctagaatgtggaaattcccctcccgtctggaggaacgaaaactgtatccacacaaagacttgtacccaaacgtccacaacgtccacagcatgactcatgacagccaaaaagtggaaccacccagacgtccctcagctgaggactggatgagtgaattgtggtccgtctgtgctaggcagcacgctgggcagtacagaaagaggagcaaaacacacgtcatggcacgaggcggggacagcacgctgggcggtatagagagaggagcaagtcacacgccagagcatgaggcatggcgggggaggcggggacacacgcccagcagacagtgagccctcaaggaagggactcgacttagcccctcggactacgcataccctccaggccctgcaagggagtcagcagctgcccaggccaggcctgggggatgatcactggcggggagatgaattcgtgtccatgccctgtgctgcgggtgtcttgttgcctccctgcagctcccctccctcatgagtagaaatgacagtagtcccgatcccacggtgggggccaggctgggctcccaggaactccactgcatgaacagcccgggcacccccatttgcctaccaggcacgaccctggcgcatctcccgagccagcgagaagcgagaccagggcacccccattcacctacgaggcacgaccctggcacatctcccatgccaacgagaaccgaggctggggctggcagaggacacggcttctccagtgtcctccagtcatcacagcatcttgtgacaggaatgtcctccactccccactgcagttttcctcctgcttttccaggacaaggatgcccacagctcgaggttggttaccctccctggaccaggcacccagttccctccatccatgtgccccagggccgagcgtccaggcgatgctcagaacacacacggacagaacagtgtgggcttggcgctggggtccagcgagggagccgcggcatggagccacccgccctgcactgccagcacatgggcctcccgctcggctgcccacctagcatgcagaccacccagccctgcacacgtgcgctgtgctcacaggagcctcatgacagcctggggcatgaggggccacacccctgaccagagataaggacatgggggccgagacagggctgggtgcccaccccgggtgaagggcgcacctcccctccagacagccagagctcccagcagcgccgcccctctccgccctcagcaccgcctggccggggctcaggggaagcgcctgttggatgtgtcaggcactgaagagctcccacttcaatcaggtttaaatgcaactgtgaagaaatccctaattgggtacttggcttgagttacaagcaaagtttacagacgtgccagaaagaaagaggagagaagaagggtgtcgcggcgacggagctgcttgccacggctggggaccgtagcaagagcaagagggctcctcagcagtccctgtggctggcacacgctgcccgggcgtgtggccgtgcacagccaggacagagaagtcatcctgggcacttctgccagacacagcaggaagggtggggccacctggctgtgccaggaacattcttacctatctctggttccccaggaagacaaagcccccagagcagcaaagagaagggctagcggggacggagggcggccctgactgtgttgcatcaggccccaccctgtggttcagcccagagcccagcagactagatgtggggctggggaggggcccaggcagcgctgtatccctacaacctgaatcgtgggcccacatatcacaccccacctcgcagaccagcacctctgcccagtccacggccagcgcccggctcagcctgccccggaccgtgctccactctgcagccaggccaccttccaaattgacagaatgcctccgaggctctgtgtgaccctcaggatggagcccagaagccccacgatggcccagtggggaccgccccagcctggtctctggccctgctgcagtgaggcccacctgtgtcccagccctgggacctcagccccagcgcagtcccctccccacacctctgctgacttctcactggtgctgcagaacctggttctgggagcgtctgtctggatcctccctcggctccgtcttggggcccccgagcatgttcccaacacacaaccgcagtcacgccactggggacggtgcttcagccctccgcactgcccaggagctccgaggcccaggccgggtccacggcatggggggcgcccagtccagggaggatctgtttgcaggcagccaggcgggtgtgcccagcacagagggtggtacccttcctctaccccgctcacctgcaaaccctgtgattaaatcccatgattcctttacaactctaattacacacctaattaatggtgctggcctttattacccaacaccaacaccaaagaacagcatggagagaagggcctagggtgtttaactggagtgccagccagccttcagcaaagccactgtgctctgaggccactgccccacctggactgcacttgggcccacctgaggagaccacagctcccggccccagggcgactggtgctgtggctactcctggccccagcccccctcccctcccctcccctctctacagggcgcctcaatgagtgcacagggtgagagcacgtggcagggcaggggcactgatccttccaacacccgtcctgtctctgggtcaccccaggctctggcggctcttgccagcagggcagttccctccggcccatgccgccgtgatccggcccctccccagcaaggacagggacctcctcctatcgttcagtcccaggagtctgcagagatcgtccgcctgtcacgctcacccttggtgcggggacagacgctcacaactgccccaggacctgggccggtggtcccgtttctcaaatggggaagctgagatgcagagagaaaagggtccacccagacccccaactgttacgacgtggagcaggacctccatccaagccttctgacctcaggctcccaggccgtccaacacggctgccccggcctcagatggacacacggtgtgttggagccagggacacctgcagcctgcaaggtctcctctgccttctctccctgacctggtgcaggaggtccaggtggctggcactgaaggcagaactgtaaagccaagcctgccgtcctcgctggggacctaccacacaaagggaggaccgcactggggaatgggctcattgggagccacttttgtttctctacccaccagcctggctcagcttctaccaaatgggctcctgcacgggcccagaggccaatgggctcaggccacagccgccatcgtcgccatcaccatcatgctgagcacacatcatgggccagcggtgcctctgctataaacacaccctccacaatgaccgtgattggagtgagccacatgtcagagctgagagagctgaacccaaggtcacatggctgctggtgcagagctgggaccatggcccaagtccaaaacagctgacagtgtgtggcaacccctcctccatcagctcaggagcaactttgctttggaactgaaatttaactttgatcaacaaaaagaaactgcagatgactctggggagggagctgaagttgcaaagtgcccaggggtggcagggcggagtcagccttacccacacccctcctccagtccacccaacgcttatagagggccagtgccaacagctccagtgacacggaggtccccagtgacacggaggtccccaggagggcgcacagcagggctgcagcagcgttaggagacagcaacccccagagtcagaagccggggctgtgtgggcccagcatccctgtccttccccagtacatgagtgctcctgggtccccggcttgcccccaaccctgcagctctcgggacttgcctgtcattgcgtgagccaactccctgtaacaagcatctccgtgtgcgtgcgtgcgtgcgtgtgcatgtgcgtgtgtacacacattctacgagttctgtgtttcggcagaaccctgcccagtaagctcgcccggggctgtgttgtctgcagatggagcagcgacagtgtgtgggaggagcaggggcagagaaagtcggggagactcggctgccgtggcagcctcacactgtgttgtggacccagcgattcctcagaggcaccaagggaagtggttaaaacaggaagacccgctgcacgctctcacccacgggagcggggggaacccatcgcatggagttgggggagaaggagggtgcaggtgtggggtgggcggggatgaacggaggctggtcagtgggtacagacgcacagccagatggaaggagtaagacctcacgttccacagccgagtgggggcggactacagtcagccacatgtgctgtctactttaaaacagtgagaagagaggacaggaggtcttcccaacacttagaaatgaccagtccatgaggtgacggataccccaaatacccctgtgtggccactgcccattctgggcatgcaagacaacatcacctacaccccataacgatgcacgaacactgtgtatccatttaaaaaccgacagcaaaaaaccctaatcttcattgactgaataaaaaagattcacgggacatccggtccagacagaaaagggtgcagattcatgttccctgctcctcctgcaaagctcggctctgagccctggagacgacgagacaggcaacccaaagagagggtggggaggtgggaagagggcggagaggcggcctggagccagcagtggggactcaggacccctgcccagcagatggcagcccagatgacacactcctgcctggaccggagcctgcaaagggaaccccggcacgctgcgggtctgagacgtggtatcggtgagggaggcggccctgaggcgcccttccctgctcagacacagacgctggaaagccaaagattcttccactagattaacctataacttcagtgtaatttcagtaaaaaataaaaccttgataccttttttttgaatttgactaattctttttttttttttctttttggagacagggtctatctctgttgcccaggctggagtgcaatggtgtgattttggcttactgcaacctccatcccccaggttcaggcgattctcccacctcagcatctatagtacctgtagctgggactacagacaccctcccgccacgcctggcgttttgtgtttttagtagagacagggtttcaccttgttggccaggctggtcttgaactcccgacctcaggtgatccacccgcctcagcctcagtgctgggattacaggcatgagccaccgcgcctggccgtgacaaagtaattctaaaattaacttagaataataaacaggtaagaaaacctttaagtcaaaaaaaaggataaatgaaattaaaaaaaacaaaagatctgaatacagacccgattttgcctaagttttaataaagatgaaggtataaatctacggggaaggaaggattctgagataaatggccctagggcaattgtttagtgatctggaaaaaaaatcaatttagatctcgacctcataccatacaccaaaataagtttcaagtagattaaatctttaaatataaaaataagctcaaagagcccagaagaaaatagaattatttatcaaatcactaaagtacttactaagcttaaaagcaacggaattaacagataagagagaacctgaagacgaggggttcaggttctgggaaagatgaagaaaccaatcagccctgtctctccctgaggcagctctgacgatggagggagtgcagccagcagccgactacagacctggagagccacaggctgcaggcgggctgaggtcggaacccagaaccactagcatcaccagcccagcggcgagcgccctgcttccagctgcgagagacatgcagctggacctggccgcgccgcgtctttactgcgctgcaccccacgagccacgaaggcagagtctccattcacacagacctcccacgcctcgcctcagcagcttgccgttgtcggcgtgctgtggtgttagtgatgcctgcagatttcatcttcagaagagtgaacagaaacggcatgtttttaatttcggtttccacatgtgcactgctattgtgtaatatttacagaactacacagacacacggacatatttctcataaagtgagctcagcaaggttgcaggatacaagagccacacacagaaatcccgggtgaactcgctcgactcgtttttatcttgtgattttcgacataatcacgccacctgtgaagaggaaaagggtcggtcctgcctttccagtccgtgtgccttcgacctcctcaccctgctgcccatctggggctctgggacatggaccaaggcggtgagagggaaggcctctgcctgagtcggcgtttcccagtccctcaccagccaggtctgcggtgagctgcacggtttctgcagatgctctttggcaaacttgggggttctcggcttctcctggtttgccgagtttccccatgaacgtgtgttgggcctcgctgactgcatttgtgcatccgttggtttggccatgtaatttttccttttggcgagctgacgcgatggattgtaccagctgacgctcgacaccaacccagccttgcactctcagaaaacagaaaatagccccgcagtgttcttcagttttgccactggttttgaagttggggtaaatgcttgcttcacagagtgagttgggaagtgctccctcttctgttttcttggagagttttggcaaattggtgctaagttttctttaagtgtttggtagaattcaccagaaaaccatctgggcctggagatatccttttttggaagctttttgattgtggattcagttatttaatggttctaggattaatgagacgatctatttcatactgggtgagttctgcagtctgtggttgaagcttgctggagtttctgtcactggttgggtgtttgccctggtgctacccagtctggacttggggacccctaaaacctgggagtgagcacaagacgcacacagcttgtcaagagaagcctgagaggcagtgtgggaaattctgtctgtctccatcctcttctaccctgacacccaggcaatcctgcgctcttccgccccggcaccctggcacccccgcgctcttccgccccggcagccgggcaaccccgcgctcttccgccccggcacccgggcaatcctgcggaggtacagccacagctggacagacgcctagagcccaagagtgggcccctccctccagacagggtgcgtggggcatgtcctgccctgttccaacgctgtggctggcgttggccgtgaaggcggctgtggccgtgggactgactgcacagcacagtgggcaagccttgcctggctctgtggccagaaggcagtgaagggaaccctgggtcacctgggaagtgctgggtgctcagagtggctctggaaggtgccctctaagctgggcatggggctctgaccctaatcagcaccccacaggtgtgagagttggactctgagctagaccacaccaggacccagccaggactgtggaggacacaaggttcaatggcctgggaaactcggcaaagagcctgaaatggaagtgccatcaggaaatgctgaaaccaacagaaatttacattctccagagaacttaagaaagacctagaatctcgggatattcaaaacatccagaatgcaatctaaaattaagcagcatgaaaagaaccgggaaaacagaaacctgccagggaaaacacgaccaacaggcgccaagatgacggagatgctggaattatcgagtgagattttaaagacgctccaagaagcaagtgattggaaaacacagacttaacttttcacagtatcttagagatgatgccgtgccactaagcttggtgtagaaagcacatcaccacaggagtccttctcgcggcagggtggcaggcattacacccacacacgctggaacccagcagacaatgtgggcacatgaattccttcccgtcctttaacttaaaacaccaccacacttggagtgtctgaaagcctctctcatctgcacggaggggaaaggggagatttctttgagtgactgcaggttgctcatcagaaaccacagaagccagaagatggggaaacagtgtcgatttttaaagtgctaggagacaagaaccactctcccagaaccccacatccagcaatggtatccttcagtaacgaggtggggtgaggacactgctgggcaagcaaacgctgagagaacctactctaaagaagccccgaaggaagtcctgccaaaccagaaatgatcccaggggaacccaggaacgccaggaaagaaggaagaggcaaaaccacaaactactttttgcctcttatgttttataaaataggcatgacagttaagagcaagaattgtaatatttcttggtggggttttccacatatagagagtaagtacataggactactacaacataaagggaggcagggagaagcctacgtcgtggtgaaatcctgacgtttccacctgaaatgataaaatatgaattataagtgcaccgtgaaatgttaagcttgcacattgtaaaccacagaaaaatcactttaaaagtatacaaatagatataataaagacatagatacatcaaaatggagtataaaaaaggccaaataacctgaaataggtaggaaagagaaaacgggaataaaaaatggaggacaaacagaaaactaatcataaaatgtacctaaatccaaatgcataaaaaattacattaactataaatggccaaaacacatctattaatcggcagaacacacatacctatcaggtgcacatgggacattttgaggttatcaaattatcagctaccaaataaactttaaattgcaaagaaagtgaatcgtagaaagtgcgttccctcaacataatgaaattgaacagaaattacccagaaaatcagggagagacactttgaaattaaaaagcatccttctaaatctgtatggatcacagcaggcatcctagtctattggcggcgctatcacagaatacctgagattaatttataacgacccgaagtttataggctcacagttctggaggctggcaagtccgagatcaaggcaccagcttctggcaagggctttcctgaggcgccatcacatggtggacggcaggagggcagatacagagagccaactaacagaagccccttttacaacagcacgaatccactcaccaaggtggagcccacgtgacctcaacgcctcccaggaggccccacctcccaacaccatcactctgggatgaagtttccaacacgtggactttggaggccacgttcaaactatggtacatcttaatggaaatttgaaaatgttttgaactgaacacacataaaaatacaacattatcaaaatgtgtgaaatgctgctaatgcagcactcagatgcaaatttctaacacggaacgcttacgttggaaagcagaaaagatctcaaatatgcaatctaatcttccacctgaagaggccagaaaaaaaggagagcaaactaaaactaaagcaggcagaaggaaggaaacacaaaactacaacagcaaaatatcaatgaaaccaaaaactaggtctctaaggagatcagtgaaatttatacatctccagaaaggctaacagacaaaaaaagaaaaaagaaaaaaaaagacataaacgaccagtatcaggaaggaaggagtaccgctacgaacccagcaggcacgataaaatcagcgaggcaagagcacagacaattcactgctcatacatttgatcacagatataatgaaccagttcctcacaataaaaaaaaccccaaaacctacattctaccaacattcagctgagatgaaagaactcactattcctgtaatgattagaacctgccacaaccacaatccctaggcccagatggtttcaccagcaaattctacaaaacatttaaagaagtaacaccaattctatataatctcctctaggacataaaagggggaatacttccaattcacttcattcattacgtgtatactacaaccagacaagggcagtacaagaaagctacagaccaatatgaacacagacgtgaagattactgacgatgtcagcaagatgaactcagcaacatgtaaaaatactatgccataaccaaggggggggtttattccaggaatgcagagttggctcaacgttggaaacttcccaaaaaaatcacaatgacacactgtcaatcacactaacggtgtaagggaaaaaaaacatacgatcccatcaattgatgcaggaaaagcatctgacagacgccaacatcctacatgataaacactctcagcaaactaagaatggaaagagcgttttcagcttgataaggaaaaaccacaaataaactgcagctagcagcacgcctcatggaggaggatggactgctctccctgcaaggtgaggagaaaggccaggatctctgttgccccatctcctactcagcaccatactaaggtcctagacagggcaacacagcaagaaaacaaaatagaagacatatggatcttaacaaaataagcaaaactgtccctattcacaggtgctatgactgcaaaggattagaaaacaaaatcaaaacagcaactaacccagatgtaagaagtgagttcagcaaggtcatgggttacaaagccagcataaacatccgtcatacatctacacacacgcactgaacacctgggacccataaaaacaagcctacaaataattacatagctccaacactaacaataaaaccaacaaaaccatgtgtatttctaacaaaaaaggggtgggtgggtacggtgaaaaccacaaaatgtggatgaaagaaaataagaagaacgtaaataaatggagagctacattgtgttcatgtatcggaagactcactgcaaccaagatgtagatgctccccagactgactgacagatgcagtaattcctctaaaaatctgagcaggcgttttgcaggtaaagacaagctgaatgtaaatcttgtccataaagtgggggattgtgctgctgatttcgagacttactacgaagctacagtaatcaataccgtggggtgttattaacagcaaaggaacagacgcttagatcaagggaacagaagagaaggtgtagaaagagacccccataacgcatggccaactggttttggacaaaggtgcaaacataattcaatggtggcaggacagtcagttcaataataatggcacaattggacatccatataaaaacaaaaaagaaaagtagcttgaactcaagctcacaccatgggcaaaaactaactcaaaatgggtcacagatttaaatgtgaacttaaaaccttttagtagaaaacaagaaaaaatatgtttggcctggagttatgcagagagtttctggatctgacccctataaaagaaaacctgatcatcagcatgcacccagatgaaaagcatttgctccgaggaacacagggtcagaaaatgaagaggctcgtcacgggctgggagaagatatttatcagctatatactcaacttggattcaccccaaactcaatactaacaattcaattaaaaaataggcagcaccaagcagcacgtggggggcagctacttctccagacagtggagagccaccagctcgtgcccgaggccttggctgacgtcacatcacttctgtctccagcactacagtcggagcccacgacggaacacctgccacacctgctgctgctccccacgacccgccggtccctagaggagcccatgacggaactcccgccacgcctgagactgttccccaccacccgccggtccctaaaggagcccacgacggaactcctgccacgccagacactgctccccaccacccgccagtccctagaggagcccacgacagaactgccacacctgacactgctcccgacgacccgccggtccctagaggagcccacgacggaactcctgccacgccagacactgctccccaccacccaccagtccctagaggagcccacgacagaattgccacacttgacactgctccccacgacccaccggtccctagaggagcccacgacggaactcctgccacacctgagactgttccccatgacctgcaggtccctagatggcaggacccaggcagacgatctcagcttggcacaggactgggccaaacaggcatggtcctgcacttcagacgccagcccttcttctccaactcccactaactgccgaacagggctggagcccctgcacccccatcccatttgaaccgctcagctgtcggcattgcacggtgtttgtactgagcaaacagaggcgtgggcaggtggcggccctgcccaggtggcacggggtgggggcatgacgtaaacacaggcctgtgccacgtgagagctgggcactgatttctggccgtgggagggcacagctggcttggcactgccaggccaatgggtagctctccacagtgcttgtcctggtggtccacggagcagccattagggcacctcactgaggccacctgtggggccagcgccagccaagcaggaaaagtgtgagtcctgagactgcagaggacacgcgccgatacagacagaagcagtgcacaggacgcaacagaaaggcagtcactgctcccgtcctcagcccaggcagggacaccaaaccaggcctcccctcgagggcaccctcctccctgaggccgagcaggtggattccaggcagagcaactctgtggccaaccatcttcccctccctcctcccctcccgggcctcccctcttttcttccacctcctcccttctcctccctggtatctcttctccctcttcctcgctcctccatcctccccctgcctccctcctccccaaagacacctctaggatcagctgtgcccacacaggcagtgacaaatttgatcaccttcaatgtgctgctaagattattttaatattaatgcattccctaattaagctgcaattaacaatctccctggcccagcctggacgtggcaggggggctgagtgaggagtcagagccagcacgggaggccgggctttggggctcctatccgccaagggcccgtgccgatggcaagggttgtttagtgactgccttgtcaaagacaccaggaaaatcacaagggtgttcctgcctgaacttccgagcagggactcagatccccgagagcaggggcctctttatgtgtttctgtgtcttctctgaccggaggtctggggcccacaccagagacagcccttggggaagccgtggcaaacacgaaagggagctcttgactctgcagccccgctgccacgtcccctcgcccatcccccactgccacgtcccctcgccccgtccccactgccacgtcccctcgccccgtccccactgccacgtcccctcgccccgtccccactgccacgtcccctgccccgtccccactgccacgtcccctcatcccgtccccactgccacaacccctcatcccgtcccctactgccacatcccaccaccacgtccacactgccacgtcccctcgccccgtcccccactgccacgtcccctcgccccgtccccactgccacgtcccctcatcccgtccccactgccacaacccctcatcccgtcccctactgccacatcccaccaccacgtccacactgccacgtcccctcgccccgtccccactgccacgtcccctcgccctgcccccactgccacgtcccctcatcccgtccccactgccacaacccctcatcccgtcccctactgccacatcccaccaccacgtccacactgccacgtcccctcgccccgtccccactgccacgtcccctcgccccgtccccactgccacgtcccctcgcacagtccccgatgccacgtcacctcgccccatcccccaatgccatgtcccctcgccccgtccccagtgccaggtcccctcgccccatcccccagtgccacgtcccctcgccccatcccccagtgccacgtcccctcgccccgtccccactgccacgtcccctcgccccgtccccactgccacgtcccctcgccccatcccccactgccacgtcccctcgccccatcccccactgccacgtcccctcgccccgtccccactgccacgtcccctcaccccatcccaccaccgtgtccgctcaccccacctcaccgctgcgtcccctcgcccaccccactgccacgtgtccccttgcttcgtcccaccgtcacatccccttcaccttgttccttgggggccctgattccccagagcaggaagagacatctgctgacccccgagatgctgggtgatcagggtgtgaggggactcccctgggacttgcttcctggtgggacactgggcgctgtctcaggccacgcggctcccccttaagccagtgacaggcctgccatctgcagacctgctggcctgaagccctcacaacttaccctggtctctctcgtgacccaggagacccacccctaacccatgctcagggccagccaggccggggaggagcatccgtctctgtctcaggctcacacctgccatctcaccctttgcagggactgtgcaggcagcctacccacggtcacaggagcgagggcgcgtcgtggggtccacgtcaagggtctgctgacaccacgggaacacccccaactcctcaccccacccacggtcacaggagcgagggcgcatcatggggtccatgtcaagggtctgctgatgctgtgggaacacccccaactcctcaccccacgcacggtcacaggagcgagggcgcgtcgtggggtccacgtcaagggtctgctgacaccacgggaacacccccaactcctcaccccacgcacggtcacaggagcgagggcgcgtcgtggggtccacgtcaagggtctgctgacactgcgggcacacccttgctcctcatctggagaatggggaggggacagccctctctggcagcaagcggcgtgacctggacttttctctttttaactttagatttacatgcacatgagttaagagcccaggaattctgtggggtgtgtcagggaacagcggtctccacacttctcatttccttcctttctctccagagtccaccatgttcacctctcagccgatcatgtcggtattaactgcatttctctggaatacacattctgtggctccttctggacttgagcgctcggacgtcctgctgacttcccgagagacagcgaggcttcagctctccctccctcccaccctgcaacacgcgtctccctcctcctggtcccctttcttaatatgaggctcagggctgtgttcagatcaggcctcagctcccttacgactgtgtgaggctgctcagggccagctcagaatgcaggacactgctgcttctgctgcttctcatgcaactctgctgtccccagagccaatggtcgtcctgcttcccacgcactcagccttctaggtgctcatggctcttggcagccatccctctttgccagctgtctacacaggtgcttcccagtctttttgtgcggggcagcaaacctaaaacctgagaaatgtgtgtggcacgcagggaaggaggaggctgccaaagagtgacccagggacctggggaccaacgtccatggcagcccacgcctggcacacacgtgtggaaagctccggtccgcatcatgacacccaacgcaccaggttctgtcctagaatctctggtgggttccagcccccgctggaggctgcccaggctgggggcttccttctctgctctatatcccagaaactctggcccgttctggcccctgccagctgctccccaggcctaaggcttccttctctgctctatatcccagaacctctggcctgttctggcccctgccggctgctccccaggcctgaggcctccttctctgcttccgcggcagaagcccctgtggtctgctctgcgtgccacagccacactctttcctggtttactccctcatcctttgggagtgcatcctctgccagcttcctgagagacggtgcggggccgtcaagtttttaaggccttgaaccctgcagatgcccgtacttcttccttcagacctgatgtggggctggggggctatgagatcccgagatgcaggtcactctgctagaaactcggaggtgctgctgctaggaaacgctagatgactgatcccggatcctttgacaagtgacctctgtgtttcttctctgaagttctcagggtcttcctttcgtcctgtgtcctgaatcttcatgctgccgcacactgtgcgggtctatccccaaccacagacagcccagtctgagcctctcccgggaggcagggagctgcgtccttccttcagggagacgtccttgaggcacttctgttatcatctgctttttccctgttccctccttccatgttcctgttgttcagacagtgggctgtacctctaatgttcttacttctcttctcctgttttccatctcgttgtctttactttcagactttctcaacgttactttacaaatcttcttagatttccattcactgttccctacttttgccttccccctgctcactgctttctcttggtgtgtgttaagctgccctgttgtttggttgctgaagccccgtcttctctctgaggagatccaggagacagtttttggagattttctttgctgggacagtgggttccctccccgctgacgctgtgtttctctgcgtttcgctgtgctctgttttccctgctcgtttcctgtcctttcccttgggctgtctgacaatccctgggtatcagctcctcactaggggagggcactaggggcccagggatactccgggtaggagcatggagccgtctgccacggttttccccagggagcgatccatgggagctgtcgagctggggaactgccaacgccaggtccttctgggctgctcggatacacagggaggtctttccaccatagcctacagggtcacacctgctgcccgtgttctgcagggcacgtggcgggggtgtgcgatccaggcccacacctgcatctatcaatccgggctcagttcaagcctgttgtcctgacttgggtctgtccagggaccttgccagccctctccagagcagcggtccacaaacgcgctgagcatccgcgtggtctgtagggctgcctagcacagactgccggccgcccccaggcctctggctgagcaagtctgagatgagacctgagaatccacatttctaagaggctcccagggaggcagcggccgacctgggtactgcactttaagtatcactgctccaagaataaactgctggcttgttttggagtcttcatctttcccggggagcggcaactgcccagggcacacagatggacagatggttccggggacccatctcttaattcagcaatcaagcctccagatccactgtgcttcagtcagtggcatccctcccctaacgccacttgcagccagttcctgggctgcgttggagttttgaggtgtaactcaggcgggttctcagctccacccgccgccggcttagattccggtttcccaagtctactcagtcctttcactgctcacccgccaattccagactccaaaagtctgcctctgtatcctctccctctgtggggttaggccttacataaaacagaggccaccaacactgtgatttttgggggcacagacacgcgctgcatcagccactggggcctggacgcccgacccaccctcacctcctggtggcgccatgtggcgcggcccccactatcccaggcctctgctcatcctccccttcctgcttccagaccacgctggccctgacttctccatggtcagctcagacacgcctcttcgcaccccccactcccaatcagccatggcccgggcacctgtcacagccagatgccgaccacccgcgtgcctgagacgcgcagagacccagacaagaggttaacgaacagacgggcgaacccgagacaggcagagacccagacaacaagggaaggaacagacgggagaacccaagatgcgcagagacccagataacaggtgaacaaacacacgagcgaaccctagacaggcagagacccagacaacaaggaaaggaacagacaggtgaacccgagatgcgcagagacccagacaacaggggaacaaacacacgagcgaacccgagacaggcagagacccagacaacaggggaacgaacagacgggcgaacccgagacaggcagacacccagacaacaggggaacgaacagatgggcgaacccgagacaggcagagacccagacaaaaagggaaggaacagacgggcgaacccgagatgcgcagagacccagacaacaggtgaacgaacacacgagcgaacccgagacaggcagacacccagacaacaggggaacaaacagatgggcaaacccgagacaggcagagacccagacaacaggtgaacgaacagacgggcgaacccgagacgggcagagacccagacaacagggggacaaacagacgggtgaacccgagacgggcagagacccagacaacaagggaacgaacagatgggcaaacccgagacgggcagagacccagacaacaagggaacgaacagacgggcaaacccgagacgggcagagacccagacaacaggggaacaaacagacaagcgaatgggtgcacagccaaggcacaggcccgtgacagcaggggatggaaggccccttcccaaatcctctcccagggtgcagagccacctaaaaatatggctccaagtctgcatcctcagctccgaaacttgccaataacacctgcagaatgcagggcggagagggagccacggctggaccagaaagggggctggggacatgggggctcaggccctcacagccacagtggagaccgggagcagcccttgtgcaggtggggagctggaaaggagcccccgactgccatcagctcgcccctcaatctggcaacacaggcccccccttctggcttttgtcctccaaccccaccatactactccaggagggcacaccacccgctagccagccactaagcccctacctgccggcagggtgcgcccagactcagggcagtcttggcttatgggggtggggcacaagagggagggaagaccccacctaagaccctccccacaaaggagcggggcagaggacaatcactcctgatacatcagcctgggtgctgggctgtgggaagcggacaagtcaccgccacacaacctctgcacctgcatgctcacagggaatgctctcccacagtacagggcgcgatggcaagtaggtgggaagaaacagaagaaggtatcatcggatgaaagctgagtctgaaatcacctcgagatgccaaaggccagaaagcagcagcctccaggccccaccacagatgagcctgcagacacccccaagggagggggctggcagccgggtggctctaacacaggagcaaggggacgccgggccacgctccaggctgctgctaagggctggacagggaaccctcccccaggtccccccagaaccaggagcgtggggcagtgcccagctccctccaacagcagagagcaacacagggggcaggggtctcctgagccccacagcctcgctgggggtgcagactgcacagtgactctggactcccagccctgctccttcaggggcaccctgcagagtcgacacagccccggcagcaccctccgaggcttggcgtgggcagaccccagcaccacctccccacatcaggggataggctggcgttccaaaggccgtgggcctcatgtagacctggagggtgtgggcaggccctgctggccctcatggaggcctcattcttccctgggacgccacaggccttggcctcaaagggctctctggacgccatgaagcacacttaagctggtgagagatggacttgttttcgtggaggactggatttacttgtgattaatggggtacatataaactgacaaatgatacgaattagtttaagggcctgaaatttcagccccttgcttctccacagctgcctgcagactcggatggctccacctgtttgcacaaccccacggggccatggggacacggggccagggtgctctgccccagcaaccaccagacccggctgcccacaggggaggacaaaccctctggggatgacaggcaggggcgcctgaggctgccccaaaggcgcacggatggacctacccacggaaggtcgaggatggcagggaccgggggtggggggtgcctacctgccacctccttggacgatggcagactcgcggcggcagcctcaaggtcggctgggacggtgcctcctctctccatggcgcgcaggagcccgcgcagtcgctcgcactccgcctgcagctggctgtggtcctcgcgcaggcgctgcctggccacactggtggggttcaggctcatgtgcagcactttggtcctgctctggtcatagtcaccctgcaggaacacacacagcacaggtcaccatggcccaggcacacacgcagcacgggtcacacacagcatgggtcaccatggcccaggaagacacacagcacgggtcacacacagcacagtgctcagttcttttgtcttcttgagcctgcctggcagccatctctcctggaaggagtggctccttccctgtgccctgtggacaggtgcaggaacaaggcctggccacctgctgggtcccttctgcctaaccacaggaacagggtgagaggggacatgcggcctttgctcagccaagtgcggtgcttcccagaattccacactcagtgcccgggagggaggcttcctctcctctgaggttcctggctgggatgagactgggagcccgtgtggccatgttcccatctcttccctaccagcctggaaggtgccccgtgccacaagagaaacaaggtcaaccacacagagatggaaggcaagggagcctggcatcagcgtgggtggctcaggaatgcgcctcgcaacctgatgttcccacgaaacccagggccgggatgtgtgtggcatccttgagggaggagtgcgcctggaggcccagcctgctgacctgtggtgggtgaccgacccccagcaacaagcaccatgcagccctgcagcagggacagccccccacagcaggggacagccgcccacagcagggaacagccgcccacagcaggggacagccgcccccagcagggaggtgcagggtcactgcgcacccgagaccccgacctcacgccacacacaaacatcagccgcccacagcagggaggtgcagggtcactgcgcacccgagaccccgacctcacgccacacacaaacatcagccgcccacagcagggaggtgcagggtcactgcgcacccgagaccccgacctcacgccacacacaaacatcagccgcccacagcagggaggtgcagggtcactgcgcacccgagaccccgacctcacgccacacacaaacatcagccgcccacagcagggaggtgcagggtcactgcgcacccgagaccccgacctcacgccacacacaaacatcagccgcccacagcagggaggtgcagggtcactgcgcacccgagaccccgacctcacgccacacacaaacatcagccgcccacggcagggaggtgcagggtcactgcgcacccgagaccccgacctcacgccacacacaaacatcagccgcccacggcagggaggtgcagggtcactgcgcacccgagaccccgacctcacgccacacacaaacatcagccgcccacggcagggagctgcagggttactgcgcacccgagaccccgacctcacgccacacacaaacaacagccgcccacggcagggaggtgcagggtcactgcacacctgagaccccgacctcacatcacacacaaacatcaattccaccacattctgtctcctgggagtagacacaggttactcaaacagggttcaggaagtgctggccgtaaaagaaaaaaaaaagagtacaactgaccttatagaaattaagaacttcatccactgaaacagtggaaaggcacccacagagcaggaggtgctgtttgaaaatcacatttctgagaaagggttcagatccagaacatacgaagaagtcagaaataaccaagggcatgtcagaaataaccaagggcatgtcagaaataaccaagggcatgtcagacaacccactctaaaaatctgcaaaacatgtgagcagacacttcccaaaaagacacccaaaaagctgataaacatatgaaaaggtgcacacacatgggccagggctggggccagaggcgcgcacgcacacacacacacacacacacacgcacgcacacagagaccaggactgggaccagaggcgcacacacacacacgggccagggccggggccagaggcacacacacacacacacacacacacacacacggacacagtccagggccggggccagaggcgcgcacacacacacacacacacacacacatacaggccaggaccgggaccagaggcgcacacacacgggccagggccgggaccagaggcgcacacacacgcacacacacacacacacacacacatgggccagggctggggccagaggcacacacacacacacacgggccagagccgggaccagaggcgcgcacacacacacgggccagggccagaggcgcgcacacacacacgggccagggccgggaccagaggcgcacacacacatacgggccagggccaggaccagaggcgctcacacacacacacacacacacgggccagggccagaggcacacacacacgggccagggccgggaccagaggcgcgcgcacacatgggccagggccggggccagcggtgcacgcacacacatacacacacacatacacacacacacaggccagggctggagccagcggcgcacacacacgcacacacacgggccagggctcccgccaagtgctgagattctgcagcttgtggctgtgagctgtggggcagtgagactggatgggcacccggtccctcaggcacagacatgaccatggtcatgacatgggtcatgtcaggcacagacatgaccatggtcatgacatgggtcatgtcaggcacagacatgacccagcaagccaggccagcaccacgcatagcaatggcctcctcccctttggcaatgagttcctgccacccttggggcttctgcccacgcactctcctatctcccagaggggaacagggaaacacatcctgtgttcagatcaccccacgctctcaggagaggccggtgtggacacaccccacggggtgaagagaccgggcgcagtaagcctccagcctcccaagagctcaggctgctgtgggccactgctctccaagtccccgaaggacggcgaggcctggcttgggctgtaccctggggacctcacttgggctggagctcatcagccatgggcaatcgtggtcccagagcccagaatgtgcctccaacagggagagaggagaggatggggaagaagggaagagacctcacccctcctggtgccaccccggactctaagacatccccctgacgtcacgtcacacaagctaactgctggccctgccacccccctcatggaagaggccagtggagatggacatgctgacctggaccagggacctccggccccatggcacgatggcagaggccgccgcagagggaagcggggtttgcagacacggctcgcttggccgctccctctgtgcttctcctgggaaggaggaggggaggggaaatccacccactcaggcccaggggagagggaggcggcagccctgccgctgggccggggcaggagaggatccgcgcagctcttcacaggttttctgagaaccttgtaaacctcagaggatgaagagacatcttgtaactctggctgaatcacagactcttggggttgaaaggattgctacttcatccagttttcacagccggggttaagataacccagtatgcagaatccagccacccacacgcactcaggagacccctctgacgggcggcactggctttccggggcctctgtgggctggacagcatctcaacctcttcaccatcctacggagcctcgaggagccagggaggatgtgggcagagggtggggccgcctcctgcggagagcagccagtcacggggctgtgcagtcaccctgcccccgtcctaaccacgtagcgctgcaactgcacccagaaagccgcagggcacacaaggccagcatgggccccgctgacggagctgcgggcacggaaacacgaatctgaatttcagataacccgcgtgtgtcccaaaatattcttcttttgattttcttcaacccttcaaaaatgtacaacggttcttagttgaggggctgcacagaaggcggggctgtagtcagctgacccctggcaagaaccaggccgcacagcgtgtactcagccctcctctgacccagagcagtgagaccctcctcccccaggcctcaccctcctcttcctccccccgcaggcctcaccctcctcttcctctcccaggcctcagcctcctcttcctccccaggcttcaacaccgcggacctcctgaagggacctccaggtgggaggaggtagtgaccatcctagaggctgcccagcaaggcctcgcctggccccagcatcctcctacttagcagatagggggacttgcaggaggggtcgggggtcagcggtggtgcgcccagcgctggcgttggacccagcagtgcctgaggacgtcaagttccccggggtggatgtcctggcaacgttcaacgttccacgggcaggaacgagagccagagcacagccccagcccccagcccccagccagggtgccccacgaccggcccatcatcctgggatgaggtttcccccctgatggggggcttgaggtccaggaaacaattctgtatattagaggatttaaggaccaaaagcccaagccagtagagatgaaggaaaccaaatcaaaacagagaaaagataaaactgagaagttcttcttaaacaccaatcctgtcaccctctggcccccaacagtgcagcgccctgcactgctggccccgctgggggcgaaggcttggtgtgtgcaaagccaccgtgtccgggctgggaccagcccccaggcttgtcctcctcagccgctacgcatgcaccaccaggtcctgctctcccggagccacagtgtgaggccaaggtcggcgcaggttcccgtggcccggcttccacctgcagcaggaggccctgggtcacggagagcattcactgggcacctgcggctggggctggagcgacctgcgatggcaccgctgaccagggctgagaacaagcctgggctccataactggtggcgtggagaacccacctcccaggagggcgagggaagtgggaggacaggcgctagggctctgtgcagatggcaacattccaggcacctagtcgtctttctgtaagttcaggggactttccctgcctaacgcctggagaaggcagagcccctagaggcagcacgggaggggcagactgggcaccacccacccgctcacgtccccaccgtgattctgggccaggctcttgacctccacgcgttcgttcctgccatccttcctttcttcccttagtccatccacccgcacacctgtctgtccatctgacatgatttccaggccctggatgccctcagcacagctgtgaatacaggggtggagctgccactcatggtgggagcagctggcatcccacagaggagcctcctgggccaacactcagcaagtggaggggacattcccggcccctccagaaggaggccacgcctgagcccctgggggcccaggacctctgctccaggtgagacaggaccgtgccccaaggtggctgggggcgacagccaaacttccagcctgctgctgtgaccacagcctgggcagcgcagagtcaggcacaccattccatgcctcggagcccgcgcgccacacatttcagcaggtgctggaagtgcaggggtaatgggagccctgtgctgaggcccgtctccagggcagccgagtgtcgggatgggaggacggccctatgtcctatacaaacagcaccactcctgcacccaccccaccaagaggagccatttcaaacacacaggcagcaaaacagcatgggaggaaactaggcgggatctaggtgattaggaaacatcccatgtctcggatcagaagacccggcgctgtcgggaccagagactcccagggctgatctgcacattctgtacaatcccaggactcagccggcctccctgaagaactgataagctgattctgaaactcacacggaactgcaggggctcagaagagccaccacaggcttgcaaagggggaacacgggaggaagactcagtctcctgatttcaaaacttactacaaagccactgcaatcaggatggtgtggtgtgggcatgaggaccgacgtacagaccaacaacacagtggagagtccaggaaccaaccacacgttcatgttaagtgattctgagaaaggtgttaagacctttcgatagggaaaaatagtcttttcaacaaatgctgctgggacaatgggctggcgcatgccaaagaatgaagctgggccccacctcccaccataaacaaaaactaagtaacaatggatccaagacccacgcaaagcccaaccgtaaaacctgtggaagaaaacagaggaggaaaccctcctaaccttggatttaacaaagaattcttagcccaaagcacaaagaacaaaagaaaataacaggtaatcagacttcatccaaactaagaactcttgtgcttcaaaggacgccagtgacaggcaaaaacaagccacagaatgggagaaaatgtctgcaaatctatacccgaagaacttacacctcaacacatgaagcactgtcagcaaacgacccagtgtcacaataggcaaggcgtctgcagacagactcctatgaggacccagtgtcacaatgggcaaggcatctgaagacagacttctatgagttcaatagacacatgaaaagctgctcggcatcatccggcatccagagacagaaagtgaaatcacagccaggtatcactttgcgcccccaggacggctgggaagtcacgcaacaacacgttggtgaggatggggataaactggaaccctggtgtgcggcagccctggagaacagtctggcagttcctccaatggtgaaacggttaccatgtgatccagcaggcccagtcccaggcagacccccgagagaactgcacacacatctacacagactcgtccgtgaatgttcagggcagctgtgttcataacagccccaaagcggaaaccatccagatgtccatcaggcgatgactggatatgtaagatgtggccgtgcagacagtggggtgtttcagccacaagaaggaacacaaggtccaccagttgatgactggatatataagatgcggccgtgcacagtggggtgtttcagccacaagaaggaatacaccaccgacacctatgaccacatgggtgaaccttgaacaagggaagtgagaaaagccaatcacaaaggccacaggactcccttcccaggaaatgctggtaatgggccacgggactccctcccaggaaatgctcagaacaggccacgggactccctttccaggaaatgctcacaacagacagacccacagaggcacgcagtagccgactggtggctgagggtttgagggcacgggagacagcagggtgatggataactagagggttcgggcttccttgagaggggatcaaaacgttctgcgaagggtgacggtggttgcactagccgtggacataaaagtcgctgaactgcccccttcaaagggacgaggtacgtggaatgtgcgtcgcatttcaatagagctgttagaaatggcgggccgggtggggagtgagaaacagcaggaagcgtggatgcagctgccagagcctgcggggctgaaaccagcctcttcctttgcatgtaccacgatttcaacttcaagagcagctctccacggggaggacaagggctgagaggggctgcctggagggagctccagggtgaaggagaaactctggggctccgtaaggaaatgtccttacttgtatcctgcttgggctgggaaatgtgaggctgaaggggatccctgcccccaagaccctcctcctccacagccggaagagcctctagggcacagtggcctgaccatcaccccccaccccgtcggccctctcccactcctgccagctgggcccagacaccaagtgcagtgaccacagtctgcaggaccaggtgacgtcagggtgtgcccacagggccctgccttggtggcttcttggagcctgcaggccacctctgcagctgatggggacaaagacccctgtgagtcagcagctgacaggcaggggaccggctggcctggcttctgtggcttggcagcccctgcaagtgcacagtgcagtggccaccaagggagccggaagcagagggagacgggtacgggcagcccctcacctgggccgtcggccactgggagagacagtggacaccgagaccctcccgctagatgggggctgcgaagggccaggcctccgtctctctctgcagagcagggaagcagcacggtgcctcggcgcccgctcagcaggggcccagcagaggccggctgccaagggtgactgctgttgccagcgggacaccccgatcagcctaaacactcatctcagtaggcgtcctccacgccagaagtccagctccgcggtgacagggactcctgtccaccaccacagccccagcaccgaggactatcccggcacaggctccatgtggaagatgtgtttgctgaatgaatgcatgatgatgatgaacacttactacactcggatgtgctcctggggcttaaaccaggtggctagagtggttagagtaacgcaggaagtaagagcaagtaggtcccacgaaagggcttggaacccttctccaagtcgtggagagtcccactctcacttcctgggtcacagccgcaacccaggagaagcagagggtgtgggagaggtgctgctgctgctgggcccaccctggagatgaagggaaggagggtgagggcagcggccatctgcagacgccatggggtgccgggcccggccagtgctctgtgagccctctttcatgtattctgctgctttctggaggagaacggtcatgcagcactcacgcgacccctcagaggtgcgggtaaggtggcggcgctgggccgcagaccggggttagggctctgcatggcgtggctgtggctgggggccccaagggactcagagggtggcctgagaagtctggaggcagtgggggagggaccaccagggcaggaggtggtccaggggcatcccagatgaggcacaggccagtgcagcctcaagatcctcctacgcaaagacccaagcacttcccaccatggacataccaagcctccagcccagaggaagggccagtgggttctgcactggggccaggaggcaatggacacaccaagccccagcccagaggaagggccagcgggttgtacactggggccaggaggcagcggatgtggggtgggctctgcagcccaggaggcaagatcacttcctcccaggccccatctgcccatccgctcagggccacccctgccctctgtgcattctggcaggacgcctcctgctcacagaacccacctctagctgcaggcccagggggtcagtgtgaggctccaggcgtggggagaagcccctccagtgctgccccggccccgtgcaccccacccacctagggcgctgagcactgtgtgtgccagcaagcaggagcaccgttgggggctggcaccactcaactcaagcagatgggagatggagcaaccttgctggaatcggctgttagctgacagcttccaggaagaaaggggaaaatggctataatcttctgctaaaatttgttgccttgtttgattcacagctgagaaaactgttgagacgctgacgagaatctcaaaaggaaaagtttggagccttcctttgatgcgatggtgcaatcattgactcaacagaaatctttcacttgcagagcgagcaggcgctctggtgctgctacccagcgcggttaagcggaagagccggctggcgggtgcagcgggagaatgctgggacgggcagggcaggtccccggccacttgcaggcctactgtctgtccaagctcccctccaggctgggcctagggttctggagatgacagggccccaccttcagacaaagcggtcttggaggggtctgcacagggagagacaaggcccagagagggtgcgggtgctcccgggctgccttgtaagcccacacctgtgcctccaggaggcctcggcctcgacggcccgtttctctctgtgttcaggggactgtctacagcccaagtcctggaggaggaggctgggtgggggctggcgttggctccatctctgttcccactgtgagttccgcccctaactcgctggtaggtctccgtcctctctgggcctcggcttcccatctgtgagggtgagtgtggtgagtttcaccttaaggacctcccttccggccaaaatgctcataagacccggagcagaggacaggaaagccctgagcccacgccctggtgcgtgcaggagctgggtgccatgggcccttggctgccccgggcaaaggaaatggcttctgaggggccctatcctcaaggtccctgctggggaggaggctgcctccagcaaggcccaggcaatacttggggagggaggcgcctgtccccgtgtgcctgacgcgcatgccgagagcagagaaagcgctggaaggaagcagcgacaagaggggaatggaaaacacagttaaataaccaccagtccttatgcatatttatagatcgtccggcgtcaaaattcaatcaatacctctcctggctgaaggaaatggctcacggaggagagcgaggcagctcgggctgtgcctgttgggccagggcattgcagaaccaggcccaccaagaggcacaggcagaggcccggccttcccatctcctgcccgtggccttgcctgcttggccttcccatctcctgcccgtggccttgcccgcttggccttcccatctcctgcccgtggccttgcccgcttggccttcccatctcctgcccgtggccttgcctgccgcacacggctgggttgtggaacctgcctctgtaacaagcccaggcgagggtcacacctcccagccctgccctcagcagcggcctgaccttgggcaacttactcagggccagcaggagggctgaagggctggatgcacctatacacacctgtcgccgaggggcctgcggggccgtgtcccacctattccaggaaagcagctcccaagcaggtagaggcacatggatgggagagggcagcctgaagcagacagagaaactgaggcccaaggagggacagaggccatgctgctgtccgtgaccagtgcccgggagcggtgggaggatgagaactggatgggggtaggacagaaccccgagagctccctttctgcagagctgagtgctccaccatggggagtgagtgtcccgggcctcatctggggcacctgcagggggcgagggagtggcccggggtcacagggcggagcccctggaggcccctccagcacacgcaccatggccaggcttcaccagaagtggaaactccccacagccaaggcgtccacggcaaagccagcctgcgagtgagcccacccacctgcgccatgggccccagcaaacgccccccatgaaccccctccaccccccagtgaccgtgtgctgtatagcctccgctcagggccctgcccagaggctaagcgagggttcaccagggcctgagggaggggccgcagctttccccagcaggacacgccctgtgagccagcacgtctgccaaaccagtggagccgggacactggcacccaggagacggcgctgaggccaccgcacagctccggagctggccttcccggcctgagaccctgctgggcagctccacgtgaaaggccaggggaggagggagctgggaggggtcatgcctgtcctggttccagcaagggtcaggggctcctcccatgacacccctgataacagcctctgtggttccatagcagagaaagggcgggcggcctgccgtggccagggaagacggcatgtgagagtctccactggtcagcggggcggggacagcatccccttcctaatctggccaaggctgagaccagatcaccctgggctgaactcctgggctccaggggctgtgcctgtggtgaggaggagatggtcctgatggcacccagcaaggctgacatctgccccacctgcctggagcagtccctgaacagagacgagatgcatagctctggagggagacccaggccagacactcgtacaacacaggaggggctgggcccgacacacacacaggatccaggaggaaggacacacagctgctgccccaggacgccatgtggggcttccctggacctgtcagcaaaggaaaagcccagctggggcaacgctgcccgggccctgctccttgaggctccagggtggctctcctaggaggggcccggggcacggcccctagagctgacactctgcggtccagagtgtgtgcacacgcactagcttgctctctgagcctcgatctgctgtctgtagagtggtggctatggtgacctaccaagtccatggaaaggtcgggcgggttaacggacgtgcacatggtctcaggctctaaggagctctgccgggcacgcaagcatcgcccggggggacccgcgcagtgaaaccaaagacgtggatctcctccctctgccacatgcgcccggctctgagtccctcttgaactccatccctgtctgaggactcaagacgtccttgagaaccgaggggcatctggcaaaccaggccatgggcaggctccaggtccaaacccagttcctcatgagagaagcaaagtgcttccccttccccagagtcctgccaagtggaggcggcggggaggggcctcttcctggcccccaggagagccgcagccactttccacctcccctgaaaccccacaggcaccggcagggccctgtgcttcccttctcctctaaaaagctgctctcatccgtttctctgcagatacgcccaggaaccaaaggacatcggtcccttggacgcagtgcctgcagcagcggctgcttggggagacctccatcgtgccatgtccaagagccgcggggactggcaccccgtgcggggcacttgcagacagggccacggcccttgcttcccagaggaggccccgggcctccaagaggctgcagacatgctcagggatatcagctttgaggagcccggaccccccaggtcccgcctttgagtttggttttctaccccaagtgcaagacatggcttcagtccaagtggcagcagcagggacaggctgggggagatcgaggtgctcagcagtgggtccctgggcacatctctacttgaggggacagcagagactactagacgatctctagacaaaggacaagggctcgtgggccaggcgtgcatgcccatgcctgcccaggcagcagacgcaggggtctggcagagcccgagctgggtcccagttccaccagccacaactgtgtgactctgggccagtccccagcaccctgacctcagtctcatgtcacccagcggcgagaatggtcaccatgtgatagggaagtgagaactcgggcacactcacaccatccgtctgtccgtccgtccagtggctctgccgccctcctgcacgtcccgcgccacctcgaggcccgcaagccctcatgaaagctcccctgacctcaggcctcatcagcagatgaaggactctcagcacagccaattacccggtgctggtaatcacccgctgacttccacccgagtccttcagaaggtaatctgcggagggcgacttgtaaacaatttggagggagaagataaaaaccccaatcgtcagaagggttggacaacagtgacttgggctgaggcctggctctgagcgccagtcgaccccacacgggagcccctcaatgtctgcccccagctgcagctctcacctcctcccctgcacccaggcccttcgccaccctctgctgcctctgtgagcagctgcaggcccacagggggagggtgctctagtggggccgttggcaaagctcagcatggggggagcagcacacgtgggcaagtgggggatgagcgggcagagcccagtgagcaccgcggtgggtcctggctctgccacccgtgctcctcgttcagctcacagcacatcgcctgccccatctgcagacgaggcatctacctgagctcccaccacggcagtgtggtcagtgcacagggcacccactggccacccaccctgggcacgaagcccatgcttcctgggaggaggaggcgggggaccagcactgtcctggtcccgctgcaaccacaggtcctcctcctccttcccagacacgtgggcttcacccgggaggctgctcccctggcctgccgaggaagtgaactgggtccctgccagactggcggatgagcaggagccctggacagcctctgctatcccagtctccccactacagggcacaaacaacagccagcgcctaaaccatcctgcctgaggctcagccagagctggcaggaggcctcaggggctcaggcagcaggtgcaggaccagctggtggatgaagggcctgaggaaggcaggagtgaccgaaggacagaggccgtgtgagggcagggttggagtagtcacctcaagcgccctgcccctcccgtccggggtgtggctcactcctaacaagctgcctgctgggtctcactgtggtgaaacgcacgtgacaggaagctgaccgccataaccattctaagtgcacagctccctggcattcagcacactctcagtgctgtgcggccaccaccacagcccattcccagagcttcctcatctctccaggctaaagcccacatccatcaacactcactctccattcccctgccccagccccagcccctggcaccggcctctccacctcctgtctatggatctgatgactctaggggcctcgtgtaggtggaatcacatagcctgtgtccttctgggactggccggtttcacccagctcagcgtcctcaggtccatccatgctgcggcaggtgtcgggacgcgcctcctccttgaggctgtatctatcatgctccaccgtatggaaggaccacactgtgtccatccatgcatctgtccacagacgctggggtgcgctcacctctgggctaccgtgagcgaggctgctgtgaacgtgggtgcccgtatccatgagtccctgcttttggttcttctgggcatgtacgcagcggtggacttgctggtcagtgtggtgaaacaaagccactcttccatcagtggcagcaccatggccaagcccccatcggtgacatttcttctagaatctcaggcttagtctgcaaactcccatggcaggaattacctaagtgatcacactttcctttctccctaggctgccaggaagctccgattaaaacagacgcccaacttcaccagcaccttcagcccttgtgggcagaacattcctggtttcccacacacagcatcggctgccgggaatctgtggagcagtgagatctcatggaaagaaaacgagcaccatcatagaaaacacgatgctgctccgaggactgcggccgactcagcctccccggcggcccggtccggagtgggcgcttctcctgtccttccacgagccacgggaggaaaccaggagcccttggtcccgccaggacctaacgtgggtccctggggccccgtgccaatgacctgcttcctttcacggacgggaagcacctcatccgtctgaaccatcagctcgctgtatgactcccacagaacaggggcccagaacatccgggctgtggctccttggcccccgctgtgccctggcttagagcagcgcctggcacagaggtgcgtgaaggtggctcacgcatgggaggggagggctgggctggtgagcatggagtcccatgggccctgcagagctgccctcccgtgatcctgcctcccaggaaaagtccaacccccttgcctcacaaaggaggccctcagggcacagagaggagcacttcccgaggccaccaggtaacaccaggcccatcgtcccggtccagaggccacactctgtccaacatggtagaaggttcaggagaaagagccgaacacagaatgaaggtcccactgatgagccacatgcgttactaagagtccagcgagcgggagaggccagacctgaggaggttggctcagagcacccgccgggaggccccggtacagggacacgaccccagcccaccacacctgggcatggacgccagcacaaagggggcagctgtggctccaggagggaacgcggccctctcccagggcagctgcagcgttggtggcttcagaattccagggatctgggggccacagggatggcatctcagggagggggtgaggaggtctgaggagaggtgacgggcccgccccaccctggtcccagggacacggaccagggatgtgaggtaccgcaccacctgcctgctggtgcagacgggagcagaacggtctccgtgtgcttccagcttctgctcacagggaacccggcaatcttctacccactccttcccaaaacagatgcacttatttaaacgtcacagggctcttgtctggtctctttcctgaacagcacttgggacattgaggttggccccggccacaaaccccacccaggcccccgccagggaggagcaggcaggtggggcggggagggagccgcactggggggctccaccagccctgaccaccaacctgcccaaacaagcaccatgatgaggccacatcgaggaacggctggagcacgggcttcagaacccaaagatgaattctacttaattacacgcacactgaggcatttagaggaagcgtgcagatgtctgcaatttacttaaagcgcgtcagaagaataaagtggcgcggcggctgggcgagggataaagagatgtcaggaagccccgcggcggaacatccgtggtggagccttggtggcgggtgaccaggcgctcgctgcaaacttccctcaacttcacaacgtatctttaaatgttcatcatcaaatgctgaaaaaacccaacagggttgagtctgaatgctgctcccatcactgctgggtgacacgggggccccacggggcacaggtgccggcccaggctgcacacttcacacacacaagctggaggctcctgggtgggactgtcaggtggggatgcgcccgcccagccagaaggtcagtgtcctgcccagtgcggcctccactggacgtgcccctctctacccagggcggcctgtgagccccgactagcctcactgtgtgtcctgccccgtagcctgtgagccccgaccagcctcactgtgggtcctgccccagctcggtgccctccatccccgcatgtggcccatcagaaccacagacgtggaaaacgtccaagtgtcttggaggtaaggacgacggtattatgacagacaacaggaatggccaccatgcaggcctggttcaccaggtatgtgcagggccccccaggagccatcaccggagatctccaaagacagcctgcgggaaaggcccgtgccctccacatccttgggagcacactaaggccaggctgcagccagtgggagacagagctgtggcccaccccaggctgtggggtccaagctgacaaggcccagtgtcccagctatgaggtggcgcatcagagggcagccgggagccagaagagaacaaagcgctggggccccagctcctcagttctaggcctggggaagagcacagggcacactcaggaggtggggacaggggtggggcaggaggccgtggctgcaggtggggtcagggactgtgccgcccacctgacctgactcctgcggctgcaccaatagccatgggggtccctctgccgccagatctggagttccacggggtccgcccgatttctgtcttcacttcagaacactgcaacacgttcaagactcattctgcctcctaacatggagagtctgagctccttcctccttcacacgcaggctccctgtgggcctcactttccccatctagagagggggcgccagaagcccggccagccaccgtccgtgggtgccccgagctctcccacccccaccacgggatgggagggcttgcagtccaggagccccgcccacccacttccagccccttcagcgacacaagggtgcacccagtcggccctaatgagtgtgtggacagctctgggctcttagggagacccagaaaggccagtgccacagcagggcccagtgacggccctcccaggaaggcagcacgaagacctcccaggcctggtctcctggcctcagcaccgcgggagggcagcggcactcgcgcccagctctaaggggtaactgaaattctctttcctcgccaaccagctgtgaactaattacaaaaagttctaactagtcaagcccctctccaagcatatgttcccaattaagtcagactgcagctgattttaatcaatcttccttgaagcggcccaacttgaaggcttctccagagggagcgggagcagggagaggagagggcatcgcatagtgggtgcaggggcggcagccggctcctggggcctcgctctgtcacccaggctggagtgcagtggcgtgatctcggctcactgcaatctctgcctcctgggttcaagcgattctcctgcctcagcctcctgagtagctgagactacaggtgcccaccaccatgcccagcgaatttttgtatttttagtagaggcagggtttcaccatgttggccaggctggccttgagctcctgacctcaggcaatccacccgcctcagcctcccaaagtactgggattacaggcgtgagccaccatgcccagccaaaagagagattttcaatggtcttgcaagattaggtgtctggtgggcaggcacacccagcacggtgacaacaagccatttatcccctagtgcgcaggcccctcccccggttcctcacaggctgagtactctggggtcacagtcttcctggatgttgcctactggttgttgggcaggggctataggtgtgtttttagggttgtcctgttgcattttgttgcagcccacaatgcactgcaatcctcgtcagctcaggggctcttcagttatttgacttgtgacctaagtagctgggcaggctgataagaacagatgaaacgaactattttgcagagtagtataacttccatcttagactaaacttctttggtttggatgagggcaagtaaggtgggtgggggggtggggtggcaggggggagcgggaggccgacaagcaggcattggtgatccaagcaggggcctagtatatcctgtttcttctgtagtttggtgacctaagccggttcaaggcactttatcttggaaatggacccctatttacagtatttccttcaatggcacagccctgggcatccagagccaggggcagcctgagccaccacagggcctgtgaggcctcaccttccccagggccaccctggacgtccccccactaagggtgtaatcgcagggggtgtcagaagtggtggcagctggagggctgtctggaagtttccaacactccacaggccgaaccccagtggcctccccgcttcactgctctgcacttgcttctcccacgccatccgggcacagttgtccctgttgccctgacccagggaggaacagctcctgaatcctgggctaggctcgaggtcaccatatcacggcataaacatctgcttccccaggaccaccaggcccagccctgtcctctccccaaatggccacactggccacactgcagcaccacgcctcagctctgagcagcttcaggacatgcctaggggcagagcccccacccctccaaggccctggcagagctcaggagagggtcacaggtgacactgccagccactcctcatgccaaccccacggtacctgacagcccttggcatctcccacagaggagtgctccgctagtgagctcccgagcacacgccgtctgcgcagaacagggatggtggccaggccccatcaggtgttcaccagtgctggcaccgcactcacccacacccctcacctcattcaagcctcaacaagctccaagggccggccactgaggacaccttggggaaagggctggaagctggagcagggaagccgtaagtggtgcctgcagggatgcctggcccccagtcagcaagcaacgtgggcaccaaggagcagggttcaggctctgctcagcccaacacccagaaagacgttcagcagctctgacgcagagcctctggtgggcgggcagcagccccgtgaccgctccctgtacaccacggcccagttaaaacaagatgacaggtcctaggctgaggacaggccagcgcggctcggagccgcccatcaccacagatgtcactcctcccatcgtcagaaactggtcataaaaaatagatttgatctgcctctaacaggtgccaagataaaatcaatggcctgtccaaaaacccggtaacctcgaacctgagggcttcctgccatgcagcaactcaggaggatgaaaaccaaagagaaagtacaattaaaagaacacaaacagcagtccagcctcgccacagcagatcccgggtgggcatagtgcaaatctgcccagagcccactccaccgacaccaggcgtgtgggtggtgcgggccgcagaggactccagaggcagccagtgcaggcctgtcagcggcatggcctccctgccaggcaagggggtgcacatgggagggaggagagttcagacagacgagccagaaaacgggtgttctgtggcagcaggaaccacggtcgttcacgacgcccaaagaaatgagaggcccaggcagtgcctcacccagaggctgccccgccctcacctgcagagctcgccgctccagctgtgcctccagcatcctcttttcctcctccagccgactccgctcgccttccagctcctcgaccttcaacctgcaaggacagcaagacggtgaccaggtgtccgaggccagccatgctggggaagtcccaccctctgggtgataaggaggtgaaaggttaggagacccagctatacagctttatttctaaatacatatctgtgaagctctcagagtccagcgataacatcaagagaaaattggaaaacgacacaagtacaggatgggggagtccgtggcggcccctgctcagctggaggagcctgtgcggagaaagtctctgtcgaccacaccttggctggaagcacagagggaaccagcccgaggcaggacgcctgggagtcagtgtgtccgtgtccgtcagccactcccagagggtgatgtgatggcggagtgcaggggacactgagggacaggaaagcaacctcgggacatcttcagaaatgaggaaaagacaggaaaggacttctactgcggggtgtggaagaagctgatgacaggggaccacagaggcacaattcagatgagaaacaaaagcacgcttccaggcgacccatggtgagttcccttctccacagtgggaatagaatacaaaacaaacctccatggccgcaaccggaatggggccagttttagttcactgtaaaaagctgtctagttttgtcttcatttctagatctaatattttgaatggaaaacatattcatgtggtttaaaaataaaaaaagtctgtcaaggcctgtagtgatggaaagattactcgacaccgcacagggacaggagcagggacagctattccagcctgagaactgctccagggcgtcccagcacaccacaacagcaagacccgaggaaacccaactctttccaagaaacctaactgcatctctgaaaaaagatcaagaagattgatacaaatgcaaaaacatctagaacacaacaagctaaaattcacaatgcctgccatccagtcaaagattaccagacatttaaagcagcaggaagacacggcctataatgaagagattaaccaaacaacgaatacctaccaagacgcagcattgcacagacggcaacactggcaaacagggacatttagacagttgttaaaactactggaaaaatgcaacagttcagactcggaagagacacaggtagaagtggaaactacctgtcagataaacatgctggatgggattaatgacagattagaatccgtaagagaaaagtttaatgtcctcgagggcacagcaatagaaactatcaaaaacaaaacacagaggccaggcacggtggctcacgcctgtaatcccagcactttgggaggccaaggcagctggatcgcttgaggccaggagttcaaaaccagcctggccaacatggcgtaaccccttctctactaaaaataaaaaaattagccgggcgtcgtggtacacccctgtagtcccagctcctcaggaggctgaggcataagaatcgcttgaacccagggggtggaggctgcagtgagccaagatcaccccagtgcactccagcactgacagagcgaggccctgtctcaaaaacaaataaataagcaaacaaacacagagaggaaaagattcctgaaaaatgaaaagagaatcactgagctgtgggacagcttcatgaggcataaaattcatgaacgagagtccccaaaagaaagaaggcagaggaagcgacgggacaaatactataagaaagttccactttcaatggaaaggataaagccacagatgtagaaagctcaacagacacgaggcagcgcaaggaacacaggcccaggaaagaagacgctggcagccccagagcacatcaggacaagcctgctcaggaccacggcacggaaaaccatcttaaaggcagaggtggtacctacagaggcacaaggcggggttctcatgagaaacagtgcaacggagaaaagaggagggagaaatttctgaaataacgaaagaaataaaaaccgccaccttaacggtgaaaacatctcccaaaacagaagcaaataaagatgccttcagatcagacacgaaagcttaaagaattcatcatcagccgacctgctctacagaaatgtcaggtaaggcctgcaggtgagggaggacgagggcggggcggggcaaatacacccagatctgcacggagaaccaggagggctggaacagcagctgcatttagggaggatctttcttacattcaggtctcttaaaaaaatttaaattattaactttttaaagtgattaatagattaaacaaaactaatgaaaatatattggggatttaatatatagaataaataaaatgtatgacaacagtataaaggctggaggagaaaaaccaacactgtggctgtaaggtgattatactgtgtgtgagaagacgtaatatcacttgaaggtaggctgtggtaagttaaagatgtatactatataccctacagcaagccctaaaataacaaagacttatagctaagatgccaaaaaaggaaataaaacaaaatcagaaaaataccaaagtggattgaaaaaaggtaaaaagaaaaaaaaaaaaggaaacagaaatgaagaagagacagatgagtagaaaacagtcaaatgacaagatcaaaactaattatatcataaacaaattagatgtaagtagcctaactaccacaattaaaaggcagacactcaaactggattaaaaagcaacacccaatcagacaccgctgacaataatgcactttaaatacaaagatgcaaaaagacataacatgccatcactaagaaaaccagcaagagaaagccagagacgctactaataccagaaatagtaaatttcagagcacatattattaccaagaaggtaacttataataataaagagattgattaatcaaaggaaaataataatcctaaacatgtgtgtgctaataaaagagctgcaaaacaaatgaagcaaaaccagccagaaatgcagggagaaatagacgggtcctcaatgacaatctgagacttcagtatccctctctcaatagctgatagaacaacgggcaaaaaatcaggaggacaaggaccacatgatcagccaacttgacctatttcacctggataaatgcttcgactcttaagagcaggagacccagtcttttcaggagcacttgaactatgtaccaagaagacctcatgctaaaccataaaagaaggctcagtctatttaggaatttcataattctaactatgttataggaccatcatggaattaaactagcaatcagcaccagaaagtcatctggaaaatactactgacaaaagcatccaacaccatgaaatacacagagatggaacggaacaggccaagaaaaacctgcacgtgacaagctccgagcactgtgaagagagctccagggcaacctccacacagggagagagagaggccttgtccacaggctgggagactctgggtgttgggaacgcacttctcccccaaattaatccacagaatcagcaacctcagtcaaaatcccacaggcttctttgtacaaattggcaagctgattctaaaattcatatggagatgtaatggacctagaatagagaaaacaacattgacaatgaaaaaggaggggctacctaatttcaccaactacgttaaagccgtagtaatcacaacagtgcagtactggtctgcaagacagacagaccgatcaaacaaaacagagtccagaaataggagcacaaacacaaccaatttttgaaaaatatatgaaggcaattcagcgtagaaaggacaaactcttcaacaaatggttctggaacaactgggtgttcttgggggaaataaagaattaaaatcttgtacaataaatgaaaatcctgctcaatcctgaaccaaaagttacaaagttattaaaagaaaatacaggagaaaatcttgtaaatttgggacagccaaagatttcttagctatgatacctgatagggtttggctgtgtccccacccaaatctcatcttgaattgtagctcccataatccccatgtgttgcgggagggatatggtgggagataatgaatcagagggcagtttcccccataccattctcgtgtgttgtgggagggacatggtgggatataatgaatcacagggcggtttcccccataccattctcgtgtgttgtgggagggacatggtgggagataatgaatcacagggcggtttcccccataccattctcgtgtgttgtggcagggacgtggtgggagataatgaatcacagggtggtttcccccataccattctcgtgtgttgtgggaggcctgtggtgggagataatgaatcacagggcggtttcccccataccgttctcacgtgttgtgggagtgatgtggtgggagataatgaatcatagggcggtttcccccataccattctcatctattgtgggaaggacacggtgggagataatgaatcacagggatggtttcccacataccattctcgtggtcgtgaataagtctcacaagatctgattttataaggggtttcccctttggcttggctctcattctctcttgtctgccaccatgtaagatgtgccttttgcctgctgccatgattgtgaggcctccccagccatgtagaactgtgagtccattcaatctctttttctttataaattactcagtccgggtatgtctttatcagcagcatgaaaatggactaatatccaaaggatcatatataacagaaaacattgaaaaattggactttatcataaaaaaacttctcttcaaaatacctgatgaaagaacgaaaagacaagacacagactgggagaaaatatttggaaagcaaataatctgataaaggccttgtatccagaacatataaagagctctcccaaactcaacagtaagaaaaataatcaaattttaaaatggacaaaaaaacaggtgctttaccaaagaagatctacagatgacaagtgagctgaatgaaaagatgttcaacatcattagtcatttgtgaaataaaaaataaaaggccacagtgagacatgactgccaacctattagaaagcctaaatgaaaacctttaaaaaactagccgggtgtggtggtgcacacctgtagtcccagctactcaggaggctggggtgggaggatcacttgagcccaggagtcagaggctgcaggcagctatgatcccaccactgcactccagcctgggcaacagagcaagaccctgtctgtaaaagaaacatttaaaaaaataaaagagggactaaggaaaaagactgtgctgcatgctggtgaggagaagctgcacaccaactactctggaagacgggcaacctcggaacacgttacacacgtgaccgccagccactccacactaggcgtttacctgaaagaaaacgaagtcgatttctacatgggactttatttataatatccagcagtttcagaatagccaaaaaccagaaaaactccaaatgtccatcgcaagggaacgtataaactggtgtctccatacgacagaacacaactcagcagtgaagacaacacagctgtgtgcacagtgatctctcccccaaccagccatgctgcgtggaagaagcaaaaagagggagaccacatgctccaggaccaacgccatgcccagaagactcgacagccgcccgccaatctacagtgatggaaagcacgtcggcgggtttggggtggggagaggaggcagggaggagggattcctgtcaaacaagagcacatgtctgggggtcttgaatatgaatgtggtaacggctccatgggtgtatgtgtgtgtacatgcaaattcaccacactgcacttgacatcgcgcagcttactgcacaccagttatacctcaggaaagctgtaaaaaccatactgtagtgaatgacctctgacatctgcttcctgcttgtacggcgcacctgcaggacatgcttccggaggcgaggctgctggccaggggcaagtgtctctgtcatcccagcagacgccgtgcgctgccctccctgggtgtctggggcactcccactcacaccaacatcctgagcatgggcctagaaggtacttctgcagcaacaatgcttcgctcctcttgaggcagggagcgccggcaggggagacatctgagcacagcccagtgtcaccgtctctcggcagggtggccgtgcagtgtgagacctagcacacacctccggcaccagctgatgcctcctggagaggttttgggagccccgcaagtgctgtggctttacaaacaaccccctcagtcttcacatcaatctagcagggaagtcctggtgcctgagtaaaggggagactgaggctcagaaagccatctgagaggcccctgatcacagagctggtaaggggcctggccgagggcccagggtgggtgttcctgaccctcgcctcccagggcttcataggggagtgaacctgcccaaggtgatgagtgacgacatggtgggggcctccaaggccatctccgagaagctgccttctgcaggggcttcttgacttagggagacgctggatgaaaaggccccttttaaaatgatattatggattctgaaggcttgggagcaaaatgctttcaagggctgaattggaatgagcgcacgcgtgtagctgcagccatgttaacagaatgacctgcgtgacccaccctcgccgccagacagcaagcccacatgcgggctcatttgtgcaccgaaggggtgcgctttcttctgctgccctcctttcagacaaactgctaccgcacagagagcgagaaagagaacaaacgaataaacaagttggggggatggtgctcaaaagctcagaattctggtttgccttcaaatggctcaaagcaatcagttctggcataagcttcttgaaattgacttactgcaacttttttaaacacgaggagcgctacataaattagctgccagcctagatctttcctcgagaagatgacgccaatcaaagcaggtgcctgtctccgagcgtgtgcgtggaaagcaggtggagggtagccgggatcttgcttataacaaacccatcacacacgggggaaacttttgcaagaaaaatgattagttgtttttgctgaactaaaagatgcataatgggggcgggaggcctgggtgccgcaggtgaggctcctggggcctggagaggggacagtagggagacccgaggcccaacgggcagacagcatccagtccaggaagcccctcacccaggccagcctcccacgggtcccagacccctgcactgcccgccagcccctccccagtgggccttgaccaccacacttcacattttacttctctgtccccttcatcaaatggctagctccacgtttccagccctgatcatggtgtctggctcacagcaggcattgatgaccatttcccttgaacaacgggtgtgggaaccccaccagagaggctggcgagtggggtacgtaggacccccagccctggagatggtcacacaagggtgggtggggcccagcttaacccaacactcgctgcgtgtcctgacacggagcacctcgcccctccaggcttgtttgtcataaagagagcacgtgacaaagccgcgcagacatggcagtgtgacgggtgcccacgcctgcccttcctctcccacagacagggctacaatgcctggacacgtgcccggctctggaaggcccaccgcactggtgggtagggaacatcgtggctcttctctcgcatcccctgacctcaacctcgtgccaccatccaggcagtggtgaggctgctgtaccaggagctcaaggcgaagtcctccagcactcacctgggggccggaaaagaaagccactgagcttcaggagcgtgggaccctccctgctcggagtatggactccccggcccccgtggcccctgcctctgctcttcgcacactaccacgggctcagcccacagggctgcagtggcggcagggagcctgaggcaggagccgtgctctctgtctgaagctgctgtcgttccagatgggcaggacaaactctagctgcgttttcctccctgtcctccctcctgcagggccgggcgtgggcccaacctccatgacaccagcaaagtgcaacagacggtgcgaagagagccccacgtccctggaggaccacaaaggggagacccagaaacgtgaaaggacccgaagatcacagaatggaaggactgaaaagcgtagtcctggagagttggggggcatccctgggtcggcccatgcctgggtcccatccacactggcatctgaagccggtgagagctgagggcgtccctgggttggcctgtgcctgggtcccatccacactggcctctgaagctgatgatagctaagctgacaggcactgccaatgtcccaggccaaggccaggagcgctgccaaggcttcacaacctgaactgggatgggaaccgcgccccacagaaggtcgctgggacctgggctagaaaccacccaggtcggctcactgctaaactaaaacactctcatttctcacaggacttaaacacaaaacctcttctcacaatgctcaggacataaccccaaattactcggcacatgaagaaccacagagatttcaagtcagcctggagagaggcagttccagctgctggggctgaggagatggggctgggttatctgggaagtgcggcggagaggggccacaagacggcccatgcagacgagtgtgcacgctctcacagcacacggaaacccaaaggtctcagcaaattcacagaaaagtgaattgctgaaaaagtatttaaggaaataaatggctgaaatatcccaaacttggcaaaaaaaaaaaaaaaacaaaaaaaatccctagagattcaagaagctgagcaaactccaaacagaataaacccaaagaaatccacacccagacacatccaaacgaaactgctgaaaactgaaggcaaaaaaaatggtgaaaacagaaaaaaactgtgtgacctcaaagggaacagcgattcgagcgtctgcaaatctctccccaggcaggaaccgcggtgaggaggaggaacgccgcaatcgtggcgtgctgggaggcgagggccgcgggccgcgctgcgtgcgcagggcagagctccttcaggaacacgagaggaataaagacggacccacccgagggaaaccgtgaggaatcgtagccacctgctctccaggagaggctgccggaaatccttcagaaggaaagaggacatgaaggatacctggagcatcgacaatgaaggaggaacagatggcagctatctgggcttacagataatacccgggtctcttactgcccttttcaaaacactgtatgactgaaaacaaaacctgtggcatttccatgtaggtagagggacagcaggaagggagagggcaagggacctgccgggaggggcttccaggtgtgacttcaagtgggatgaggctgattctcagtaggcagtgataagtactctaattcccagagcaaacactcaaaacatcagactgagaaatagtcagatgcccatctgctaaattaaaatgaaatactaaaaaccattcaagtaactcaacagaaagcaggaagcatgaaaaggaaaaacaaaaatggaggagacacacaaacaaataataaaatggtagcaatgaaaagacagagattgccatgatggtttagaaactgacccgatgacatcatgtatacagaaactcaaagaacgggtacaggtacgctgcaagtaaaaggacagaaatatttacagcacgcaaacactacggtaaaggcagctggcgggagggtgtagaagcagtgccgtcccaggagccacaggcatacccagaccctgacctgggctgctcaggactgtgctgccaagagaaggctccgggctccctggaggaacggatgattggaaagctggggcagaggacacgaggtgagtctggagcaccctgtggtgccagagagtgaggaagggctcagaaaacccaatgacggggcacagcagggcgcggccggccgcggggagatcacgcagcgaaacaagtcccgctgcatgcaccggatcagaacacagagcacacggcaaacaccctccagtccacactgctggcaataaacaagttccggtgcgtgcaccagatcagaacacagagcacgcgggaaactccctccagtccacactgctggtaataaacaagtcctggtgcgtgcaccagatcagaacacagagcacgtggcaaactccctccagtccacactgctggtaataaatgaagaagtgaataaatggggaagaggagacacctccctcacagaactccacatcatacatgtagaactcatccctccagagggggagcgtcgcctgtgccctgagggattcgcttccaaggaagagactggagaaagtgcaaacagcttcgcggacgaggcacccggcagagcacgcctcaatccggcggtcaggtccaccgtcgacgcctcagtccggcggtcaggtccaccgtcaacaccagcggtcttgtccacatcaacgcctcagtccagcggtcaggtccactgtcaacgcctcagtctggtggtcaggtcaaccgtccacacctcagtccagtggtcaggtccactgtcaatgcctcagtccagcggtcaggtccactgtccatgcctcagtccggcgatcaggtccaccgtcaacgccagcagtcatgtccaccatcaatgcctcagtccagcggtcaggtccactgtccatgcctcagtccggcggtcaggtccaccgtcaatgccagcggtcatgtccaccatcaacgcctcagtccagcggtcaggtccactgtccacgcctcagtccggcagtcaggtccgctgtcaacgcctcagtccagcggtcaggtccacctgctgttgcgtggatgtcaggggctccctgatgggacgtggtgagaaaggacttgtcgtctgtgatcttccttccaaaaaccaccatctcaggttaacaatgaaacacatcacacaagctcgcttcgggggcgttctagggactcctaaacatactgaggtcaggagaagcgaggaaagacaaaactgtcaccgaccagcggcagaagagatgtgacgactaaaatcaacacggtgccctggctgcaacatgcaggaaagcctggtggatccaaacaagggctggagacaggcccagagtcacacgccggtgacgagcaccatggcagcgtgagatgtcaacagcgagagaaaccgggtgaagagggtatgagaactctccgtccaatttccgcaacttgcctattgaatctggtaaacagtgtggcaattccatcttttcaaaaaatcgactgttggccaggtgtggtggctcccgcctgtaatcccagcactttgggaggccgaggtgagtggatcacctgaggtcagcagtttaagaccagcctggccaacgtgatgaaaccccatctgtattaaaaatacaaaaattagccaggcatggtggcacatgattgtaatcacagctactcgggaggctgaggcaggattcacttgaacccgggaggcagaggttgcagtgagccaagatggtgccactacactccagcctgggtgacagagcgaaactccacctcaaaaataataaataaataaataaaacaaaaaacctatagcttatgtcaatctcaatggtgaaaggctaaaagcttttcccctaaatcaggaacaagacaagaatgtctgcttttgctgcttctattcaacatagccagaacaattagtcaagaaaaagaaataaattgtatccaaattggaaaagaaaaagtgaaactacttctctctctttgcagatgccaggctacagaaaaccctaaagaagctgcaaataacctgttctagtcaataaacaaaatcagcaaagttgcaaaatacaaagtcaacacacaaaagatcagttgtatttccctgtattaggaacaagcaatctgacaaggaaatcaagaaaacaattccattcataacagcatcaaaaagaacaaaacactctgcaatacatttacccaaggaggcataagatttgtaccctaaaaactgccaaacattgctaaaagaaatggaagaaaacctaagtaaatgtaaagccatctgtgtcagggagaagaagactgcccactgtttacccgtcagcggagtcaaaccccctgaaaaagaaccaccaccagggagactcatagctcctgacctcaaaatttatgagaaagctacctaagtgaaaaaggaactgacttttatacacaaacaacctggatggatctcgctcgagggcgttgtgctgaatgaaaggagccagtctcaaaagactgcatgttgtaggactgggctggaaaaagccgagccgcagagttgagcagacatgtgcagctgccgggaggtccctgtgtggctgggtgaatggaaagggggaccatggaggattcctgaagggttgatgttattttgcactctgattacagggtgattagagttcatagagctgtatcctataagaaaaaagttaattttactatataattttaatttttacttttttttttttttttttttttgagacagtctcactctgttacccaggttggagtgcagtggcacgatctcggctcactgcaacctccacctcccaggttcaagtgatcctcgtgtctcaacctcccaagtagctggaattacaggcacgcgccaccacgcccagctaagttttccatttttagtagagacggggtttcgctatgttggccaggctggtctcaatctcctgacctcaggtgatctgccggccttggtctttcaaagtgctgagataaaaggcgtgagccaccatgcccagcctattatataattttaaaagtaaaaaatttaaacacctgctgggctgtgtcctatatcttactgtggtggctgcatgcttgtgcatacatctattgagacgtgacggtggcatctggtgggggaatggtggtagaattgtagatcattgctggcattctttagaactgcaggcatgtggtggtaagaagtgcatccacttttatttacttattgttttaaaactctgaagataatgtagcctctatgacctgctccccggataagggtaccaccgcccgcccttggtactcgccgaccatgaactcaggtttaaatgaatcccttccattgtgtgcgagttgcgctaatacagtagatatccttaaactccttctcaggcctgcagttagaattcagtagtgtggagatgcatgcagtgccacccggggcccacagccagcccttcggtgtgcgagttccacctcaatacagtgaatatccttaaaccccgtctcaggcccgcagttagaactcgatcaacgtggagatgcacgcagtgccatgcggggcccacagtgagccccgcacaaacatcacttgcctctcactgcaatcatggccaccgctgctgctgggggctgttgccgtcaccagtaagaaacacaagcgatgggatttctcagtgcagccaggctcctacaggctacagttggtctttccagacacacagaattctctcgcacagaagtcaaaacatggccaacagttcaccttcattctcactaggtgaaaacgcgaaaccactcaagctccaaaaggggttaatcaactatacattaagacttacaaaaacctataaaaacatggggaagtgtttatgttataatatatagtggagaaacaggatgcaaatgatgtgtgtttcacttaaaatatatattatataaacggaaaaatcatcaaagacttcagttaaagacggtagcttgaacacgtgcacttaagtgtaatctctctcaaaatcccggtaaaacaagggtaaaggttttgcttactttttttgaggcatttacctgaagacaaagaaaagaaggcacagcatcaaatagcctttaaaatggaagctggaaagcttccagacagatgagtggcaaacgaccccagaaaagctgaatcccacgccagcaatggaacagccaagaagctttgacaccacaagctccccaggttcagggatacccaccccagcaacaatttccggaagcagggaggagggagcgctggaactgcagggctggctggagacctttaaaacagaatgaagacctcatcacagattcacagcaatttgtgggaaacgtacaaggaggtccgtgtcctctttacccaatctccctcgatggtaacaacttaaacagcaatatcaaaaacgggacaactaacatgggtacaatccagagactgctcgcctgccgccagctcacagacacttccctccatgtctactcccacgtgatctgtcatatgtgtggatgtgtgcgcccacaactgccatccagacacaggcctgtcctgacaccggaaggctcgccccgctgtccttttgtacacacatgcacccccgtgcctaaaccctagcaatctcttcaattttctgtgtcaaattgatcttaattattaactgtttggtagatttctctagggaaaccatttgggcctagggatatccttcgcatctttatgacttcaattttttttaaaaaaatagtttacaagattattcagataacctatttcatcttggtcgagtctggtggcttgtgggttctgaggagtgagtccgctgcttcaagttgtttgtggcataacaccctctgcttaatggctacagggcctgtagtgatggcccctatttcattgctgatattgatgattttggtggtgtctttttatttttgtcaaatttgctagagatttgtcaattttattgaattttttttccaaaaaagccagaacttattgttttaataattttctctattttttttttaatttcattgctttttgctcatgttatttccttcatccatgcttgctctgggctattccactctcctttctccaggttattgagataggaacataaattaagagaccattcctctttctcaacgtgaacactgagcatgacgtacttccttctcagcaccggtctagctggaccccacttacttagatgtgtgtatttccattattgcccagtgtacttatttgtaccgggagacctcctcccccacacgggcaatgcagacatgtgttgctaatctcctaatgcttagagacttccctgttgttcttctgttactgacatctagtttgggttcattacactcagagcacacagtctgagtgaattcgattctttcgaatttactggggtctctttgatgacccgtgatgtgatctgttgtgactgtcccaggtgaatgcagaggcaagagtcctctgctctcggacagggtgttccacagacactgattaggtcctgcgggctgatgaggacactcagttccgtcagtcgtggaggctgaggtgtgagttctcaactgtaaatgtagatctgcccgattctctgttcatcccagacacttctgcgtcctgggttttctaactgttatttggcttgtgtacatctaggagtgccagacctgggggcagagtgggagttctgccaccgcacagacctggcggacaccatcctggtacacgcggagtgcggacgtgcacctgctcacaagggcgacagacaggcaggtgtgaactgggcccctagagtggggatgcgtaccccactcacgagggccacggaagggtggatgcgagctgggcccctacagtggggaatgtgtacctgctcacgagggccgcagacagctgggtacgagctcagcccctagagcgggaatgtgtaccccacacacgaggaccacagacaggggggtgcgagctgggcccctgcctgtctcgccaccaccacggacaggaggcatgaagggcagcggcagcctccctgctgcagggtgtggggaaggccctgctgagcctctgacatggggtcctgggggttgaagacccccctccacatcctgctctgcctcggtgctgggtgaggtgtaggctccgatccctgttgggcatggcaacactactggaccagagagccagagctgggcctgcctctgctgaatggcaccaaggtccctgccatcagccctgctgaccctgcccagcacagacacaggagcagtgccggctgctgaaggctggggcaggagacgcgctccccgaggggccacgctgatgctgctgggcggggacagggcactctgctggcttctgcttctgggagtgaagggcaggagcctgcatgtcactctgcacatcctgcataagatctccgggctgagacaggcccttaggtaaggcacggacagggtgccccaccgcaagaggagtcctgcattggcgacacacttccctgctcagcccccaggagctggcagcacaggcccccacgccagagtcacccaggctggagaggaaagatcagaggcccctcccaagggctccccagtggaagacccagccggattcctcggagaagcacagggcaaacccaccctggcacaggcagctgggaccaccaaacgcttaaggaaatcatccagaaagaaaagagtaaggtccaacactggcagaaaaacagcaacttagagcaacagagaacagggttcactaggagaagaaaactccaaaaagcactattattaacatcaaagacacagtgaccccactgcactcatgaacactgacaggatgctttatacataaaagaatcctcagagaacagaaacagactctcaggaaacgaagagtatagcaacaaataaaataagaacaggttaacaaagctgagaaaatacagaaggtaggacaaaaataaggaaaataggatcaaaaagatttaagagagagaaaactattcgaaaatccaacatccaagtaacagtttcagaaagaagacacagaaaacagaggagaggaaatgatcagtgaacagagccaggaaagctctcaagagcggaagggcgtgagacgccagaaggaaaggcctggagtgcccaatgcagcgcacagagcaggccccggccagagtgttcgggtaacctgaggatgctggggaccaggggaccaggggaggtgggcaggctttcggagagaaagaagcaggtccggggtacaggacccaggcaggcagggccctgaggacccaagctgcaggccggacctggggagcgcacctgccttcactggctgtggtcaccggcaccacctgcagagcccaggcgcaggggccgctgtcgctaccggcagccaggcagtgggctggggacagctctggtggtcacgggcctgctgacagtgctgcccagccaggtggaggcagctcaccagccttcaccctgttgacctggctgcctcagcctgctcctgaagctgctcgggggagggagaatgaggccacaaaggctccccaggtcctgccctgggctcctgatccccagatgggctgggcagtccatcaccaggccccctcggggccacgccttcccacctgggaccatagcatctgagggtgacctctttccagccacagctgcccttccaatgggaccaatcacttgtactccagacccggcccagccagcaggttctccacggtgggcagcaggagcggctgcagaacaggacagaaccagggaaaaccagttccactttcccaggctgaactctccctggcggcctgggctgggcacggtgagctcaaagatcaacccactgccctagaagcttggcaggcagggactgtctttccagttacctctatgtagtttcatgaggggacttagagcagcggtgtttaatggagatttgttggatgaaagatgataatttctacaaaagaacattaaaagtctagcacctggccctctggaaaggacgtgggcctgggcactgggtccctggggtgtgagtggagatcacagagtgtcctgaagagtggggacctcgggtgagtggggtcatgggtcacctctcgtcccctgaggcaggccggcgtctccagggcccccagcacctcccgggacccagaagacatcacacggccgggaagcgagggtccgagtgtgactagcaggcactggcacagataggcaagcctctggaattagcaagcgtctaaccagttgctgaatctacaggcaacatttaggatttgctagagctgctatttgacagcagagaggacgggctcagatttgttctggctgaaagggctcctcagctgctgcctcttaaaaatccccaccgacgctctctctagcttcagtgttgaaaaacgatgctatgtgatacatgtcattcacatacaacaaataaatggatgtgaaaatgtgagtgtgcatctgggcaagagcaggcacacatgtgtggctgtgcatgtgtgtgtgaggaccatccctggtcctcctgtgtccgagattggtgggttcttggtctcactgacttcaagaatgaaaccgtggaccctcatggtgagtgttacagttcttaaagatggtgtgtctggagtttgttccttccgatgttcggacatgttcggagtttctttcttctggtgggttcgtggtcttgctggcttcaggagtgaagctgcagaccttcatggtgagtgttacagctcttaaggcagcacgtctggagttgttcgttcctcccagtgggttcgtggtcttgccggcctcaggagtgaagctgcagaccttcgtggtgagtgctacatctcataaagcagtgcggacccaaagagtgagcagcagcaagatttactgcgaagagtgaaagaacaaagctcccacagcgtggaaggggaccccagcgggttgccgctgctagctctggcagcctgcttttattcccttatctggctccacccactcctgctgattggcccattttacagaaagctgattggtctgttttgacacggtgctgactggtgcgtttacaaacctttagctagacacagagtgctgattggtgcatttacaaaccttgaggtagacacagagtgctgactggtgaatttacgaaccttgagctagacacagggtgctgattggtgtatttacaatcctttagctagacataaaagctctccaagtccccaccagattacctagacacagagcactgactggtgcgtttacaaacctttagctagacacagattgctgattggtgcatttacaatcctctatctagacataaaatttctccaagtccccaccggactcaggagcccagctggcttccgacagtggatcccacgccgggctgggggcagagctgcctgccagtcccacgtcacacgcctgcactcctcagcccttgggtggtcaataggaccaggcgccgcagagcagggggccgcgccgtcggggaggctgggctgcgtgggagcccacggctgggggtgggtgtgggctcaggcatggcgggctgcaggtcccaagcgctgccccacggggaggcggctgaggcccagtgagaattcgactgcagcgcagatgggccagcagtgctgggggacccagtgcaccctccgcagctgctggcccaggtgctaagcccctcactgcccggggccggcaacgctggccagctgctcggagtgtggggcccgccaagcccacgcccacccagaactcgcactggcctgtgagcaccacgcacgcaaccccagttcctgcctgcgcctctccctccacacctccccgcaagcagagggagccggctccggcctcggccagcccagagaggggctcccacagtgcagtggcaggctgaagggctccaaacaaaatggtggggacgagaagctttgaccttgatgtaaaagatatcaatgataaaggccttttcttaaattgtaaaaatgaataaaccccaagcatgccagcccacacaaatctgacacacgcctggccatgctcccatcaactgcagaacgagaggttctaggtgccaaaaggcccagcagaaagcagagtgccatctcagagagcggggagccgtgcagcgtgacgcaggctcctgcgtgggcagccacgggccgggacacgctgaccttcctgaaaccttcacagatgctggaagccacagctgcaactccccagatttaagaacctactccaccacctcccacgtggctcctggggactggaggacaacggtggagaccaccctgcctcgcgtggcattcaggaccttgcagggtcaggcaccagccacaccagcccagaccttcccgatgcgctgctgtgcacggcctctccccctgcgcccgcgtgcctccagaggccctttctccatgatgacaaggtgtggcctctgctgctggtcccagctccccctctcactgcagacacacattgaagcctgtctggcacgtcatccagccttggccttggtgagctcctgacctgcctgggctgcccttctgggccattccttctgtctcactacacactaccccctctccgaggcctccaggcccgctgctctgtgtggcaagggtctttctccccaggtggggctgctcttgcaagtcagggtgtgtgtgggaggcatattttgctcatctctgcaaaggaaaagccaactccggcttcggaggggctcccagcaccaatgcttggtgagcaggtggtggggacggcccctctgccactctccttcccctccccaggcctggcagccagtgctttctccagtcacattcttccactttaaagcctctagtgcctcccactgctgctaggaaagagactgcatgctcaccatggcacctgcccggtctccagcttcccccaccccacacccacactcacacacagcccccaaccccatcaacccgaagaccacacgcagacgcacttccagggggagacatccactgtcacaggaccacgtgcacctcacaggctgtaacgacagagcctctaggtgaagaatggcccccaggtccccgagacatggagacgcagatgaagacggagagcgcgtcggggcccactcaccactccatcagcctccatgctcggccctaaggacgccacggcacacactcagtatctgaacacttgaacggctgagcagatgtaaatgaaaccgctcagactccggcagatcccagagagggcgatgtgtaaggcacagcccatgcatgaggaatgcttcagagacgctggaggaacatcgaatctagaaggcatcatagctgccatgtgcagagcacttcctgggccggggccacactaaaggcagcccttttcctgctttactctcggcaaccctgagaaagaggggccatccacaggtgaaaactggaaccccagggagtgggtgtgacggacgaagcagaggctgctgccgcggggggtccaggggcccacacaccaaagctgtgtggcctaggaagggtgctctctccccactgccacccccatctcactgcagggccatttgatgtcccctggagctgtctcagtcccctgttctcagttcctctgatgaccaggagaaaccctggatgcccagggcctggcctgctgcagacactcagagcagaggagtggccaatgcaggaaagccatgggcctcctgccaccccaccctgtgcccacagccaccgcctcccacattggattctggcaggatactcgggttgccccacagccactttcaatccgcactggatggggcagcgccaacacaggcaccaaagcggagcccggagctccacctgcatctgcctggaaacctcttgcctgaggaccctgatgggtccacaaggcgggggagaggcagagagctctagaaaagcagcccggcctgcagaccctgctctaggggcgccgtgtgcaagcaggagctggggtgagggtggcctaggacagtgcagtggcagagagctggcagcatgtctgaagcggagcccaagggctgctggacacgcctggctgctgcactgcctgggctctgctctgagccacactcccgtgcagccatctcggcacagcactgccatgcagcccctgcggctgcagacccggctccagcgccgccccctgatggaggacctgctcccttctgagcgtcagggacactgagagacccctgctgtcagtgctggctggagaagtgctgctgaagaaagggccacaccagcagagacgagtgtccctgcagagaggaacctaggtggatgggatgggacttacaaagaaaagcccttccaggaaggcagcagaggagcaagactttactccagccacccacgggggagcacacagagaaggtcacggcctggagagggggacaggaggctgccggtggacgtgtctcccgcactcccctcctctggaaagggcacacctgagcgtgcgcacctccccgctgggggacacgcctgagcatgtccacttccttcctgggggacacgcatgagcgtgcccacctccccccaccccacaggacacacctgagcacgtccgcctcttcctccgtgggacacacctgggcgtatccgcctcctcccccacaggacacacctgggcgtatctgcctcctcccccgcaggacacacctgggcgtatccgcctcctctctgggggacacacctgggcgtgtccgcctcctctctgggggacgtacctgagcgtgtccgcctcctccctggagaacaggaagctctgttcggcagagctggactgagacttcagcatcttcagctccatctccagctaggagaaagcaaaggatagagggtcagcagacacgagcgcacccaggtgtgtggggaaccccagcccaggcccctgagaccacccctggcagcacccccgccctgggctgggagctgcgggagagacctctctcctggaagcctgaagctgccaggccagacagcactctaactttgcaaactcaagttctctcatttttttgtcacttccatctcctgaatagcaacagatgcacaggctcacggtgaggtgtgtggggtgcatgtgagagtctctggagagtggacacgcagctggggagagagcacgctccaacgctgccgtcggtttggtttaacagccacaagccgtcgtttattccgctacttccaattcctctacagaacagcgtgagatgctgcaccgcccgggagggagcctggattctgtttttcttttctgagatggagtctcgctctgtcacccaggctggagtgcagtggcacaatctcggctcactgcaacctccacctcgcaggttcaagtgattcttctgcctcagcctcctgagtagctgggactacaggcgcgtgctgccacgcctggttaattttttgtattttagtagagatggggtttcactgtgttctccaggctggtctcgaactcctgacctcgggtgattcacccgcctccgcctcccaaagtgctgggatgacaagcgtgagccggtgtgcccggccaggagtgtggattctaactcgcccctacacacctagggtgggaggcatcaggggcagcagacggtggggaggccaggagccagaacggactgcgggctcaaggaagagcagggcacagacgggggcctggtcaggcaggctggcgcaggctgaggggctacgtaggcaccagctccagggcccgggggtgctaaggaaggcccacccagagacgcccctcaccactcctggggtgtctcatggacaggatccgatgggtttagggaggtaaatcctgcccctggcccaagtcagaaccttgttcccaccagtcctgacccactccaaagcccagctcactccgtcacgaagggaggaggaagggcagtgtggcctcagggagggaaggacaggtgccagcaggtaccacggcagccggaggcccccagcagtgaagctgcaaagcctgccagacacccagggtggaatgatgtgagggggacaacaccccctgggctgggggccagcaggagcctgggaaaaaaggcactggggcagggggtgcacagtgtgcaacagggcaggatatgctaattaccctgatctaatcaccatatgttacatgtactgaaacatcactatgtaccccataaatatatacaattatcatgggtccattaaaaagaaagatccacagttcagacaacaaacacggatgcccatgccctgagcagcctgtccccaacttccaaccccagcgccccaggcccccgactctcagccagccaacgttctgaggtttgagcatatgttccttccggaggctgctggtgcgcatgccagcaacatgtctatgttcttcctcccaccacacttcattttatttaacaaaaatggtaagatgtcctacacatcatttggtaccttgctttttttcactatatatataaaatataaaaatatatacataaatatacatatatattctgagacagagtctcgctgtgtcacccaggctcgagtgcagtggtgtcatctcagctcactgcagctcccaggttcaagcgattctcctgcctcagcctcccaagttgctgggattacaggtgcacgccatcaagcccagctaatttttgtatttttagtagagacggggtttcaccatgttggtgaggctggtcccgatctcctgacctcaagtgatccacctgcctcagcctcccagagtgctgggattacaggcgtgagccgccgcgcccagccttttcttcttctttctaacttatctttgtatacgtgattttaaatttttgtttcccgcccccttcactaaattccgaccgacagcagcagttctcagttgattctcttggcacataatcttatcagcagcaaagagggacgattttccaattttcctcctccttcccaatattgataccttgggtttctttcccttgtctactttggatgactagtatctccagaataatacgaaatcacagttgtgatactggacatccttaggtggcctgtggcttcactggagctgaagccaatactttcttatttacagcacatgaccttttttttcaaataggtattttctatcacagtgagaaattacccatatattcctattttattaagagtttttaatcaaggctgagtgttggattttgtcaaacgcccccatgaagagggtattctataaattgatatcctaaaatcaagctgacaggctggtcctggaataaatcttactgcatatgatgtatttcaacctgctgttgaatttcactcgtgacatgttaacaatgacactgatacacgtatgcgcgtgcatgcacacacacacacgtgcacacacgcacacacacccacagacgcgcgcgcgcgcgcgcgcgcgcacacacacacacacacacacacacacacacacaggcttgtaaggcctttgcagttgttggtgtcaatacaacacttccagaatgccttcccctccttttcccacagtctgaactggtttacacagtgctcaaagtatctgcgctttgaagatctggtagaattttcccatgaaactggcttggcctgatgcatcttctgtttctttcctcttgtggtgggggagagcagccatggcaattttgggacaacgtttttctacagtaattgatctgtttaaaatttctctctcttctggagttgggattgataggtaacatttccctaaaacgtcattcatttcccacagatttttaagtttattaaaatggaactgagatataattcataattctttttatagaaatcagacaaaactcataattctcaattttttaatttttgcttttctttcccatcgaggtatacataatttacacgcagtaaacttctcaatcttatgtgcacagcctgatggctttttatacatgtcttcacctacgtatccaccgtccagatcaggacacagaattctcagcacgcctgaaagctctcgcatgctcctgctcagtcaatagctccaggtaattagtcttgtttcctattttggatggtgatactttctatcaattttttattagaactgtgaataattcatatgttttattggttttatttcaaataacaggtatttggacttatttattatttctaccatttttcactttcctattaacttctgctttgatctttacaaattcctacctttttgtttcactaaggtttactttccttttgttctctgacttcttgggttgaaggtttaatccatatatttacatgctttcttgttcaatgatataaatatttaaacttgtgaatttaggtggttcccacaggctctgatgagaagtgttttcatgacaattattttctacatcttatgcacttttgaatcgtacttctttgaaccaagaattgtttaagacacagtgttttgttctgtttgggttttgttttttaaattccaagtgttaggagcttttttttccctgattttgttcttgatttcacatcacactgcaatcacaagaagttgtattagttctacttattttaatttataaaggctttctctattaccgaatacacaattaatctttgtgaatgttttctatgcactccttttaacatgagtatattctctaatttgggggatatgggttttacgcacatatgtatttttctgttttccattattctttgcccacttgctatatcgcagattaggacataaatcctgctactggcatctttgacaatttcgccttgaatctttcctcatttctgcttttcccaacagcggtgatgtgttatttggctaacccatctgaacctcactgtgaaaagcgcccacctttgtttctgagcggcttctggcttgaactcacactgcatggagatcatagctcctgctttccaggttcacttcaccaggatgcctttgcttcccgtactttccaacatgtttggttttgctttgcaatccaatcaggaagtcctttccttttaataggagagtttagtccaactataactggatttgtgtctatttctgttgtattatgttgttatgctttcgattttgtagcttttacatctatctcattctgtggcctttttaatctagtttacttttttgcgtgtaattctctcgaggcttagaaaagtgtgcatgttttaccctggttgcttttataactcagctttgtttcacaccgatactttcctactagacagtacctactgtatctcctatgttgggtgcctaactagtcagatacatcatcctccctgttgaactttatagtctgtgacggttcattccatgtgtccactggacaggacctggggtactcagatcaaaacactttctgggtgtgtctgggagggtttgtggatgagatcagcatttgaatcggggactcagcagacggccccgggcagcatgggtaggcctcctccaaccccttgaggccggaatgaaatgaaaactggaggaggcgaccgttcctcccttgcctgcctggtggcctgagcggggcagctcccgttttccgcccaggactggggctttcaccacaggctccgctggttctcaggcctgcagagcggactgggcacagcacaggctcttccaggtctgctgtgcacagatgcagaccacgggatcctggctccatggccaagagcgagggcctcacagtcactctctcgggatagaccagtctaccgcacctggtgctctagggagcctaacatgcagctcgatctgctctccccacctgatactacctttagatggtgtgtctgtgtcttcggctctcaacagcgaagccgccatcctcatgttctctcctccctctgccatcctgacacttctttttgaatacatgacatgtagcacttacatttccaggcttccacattcacttcatcttccaattcaggagatggaactcttgctgcgggttctttaggtagttttccccgtgattcgcctccccgtgcatccggtcaccttccttcctgtactgccccctactgccccctctcctgctctgagaccctccgggtcctgtctcatgcaacccccggcctcaccgtctcttcttggagcgtgtgcgttccgcccaagcctcacagactctaccgcctcgttaacttttgtttcttggcaaaatgtctggatagaattttcatctgctcaatgtccaccgtttttctgtgaaactttttctgccacttgtttttgttctttttctcctttgctctaacacaaatgcatggagtaacctttactgctcactgctgaagatgagttttattgaatccggctccgtgcacaggttcacagtggggaaggacaggcctgcttccttttatctgaaatccagtgacagttttgctgcgagtccaatcagcccccagtagctccctccggcaggagagaaaggacaccgtgagttttcctaagagcaaatgttctgtctgccacagatgcggcttcaagtacgtgtgatgcacctgtgtgacccctcagctcagcaccaacctctgctgcagcttggaaccacacgccagtccagcttggaaccacacgccagtccagcttggaaccacacgccagtccagggacccccgttccagctgccgccggcccccgcactgcggagccagggtcaggggccgcctctcgcaagggctcacgccggcaagggagttctactccgcggctccctcgcgccggcaagggggttctactccgcggctccctcgcgccggcaagggggttctactccgcggctccctcatggagctgcctccacccgcactgctccaggcttccccggggatgtgtctgctcactgcgtctgctcactgcactctcctgcaccacgggcttcctgcctctgcctggggcttggtttgcagctgcatttctgttttgtcaaaatttaagtgccattttggttttcacgcttcttgttatttgtagatgatttccaggaaacaagggggaaatgctgacgtgtgccacaatgttcagagcaaaaaatcaagcccttttattttaatgtgtaaccttagactcataagtaagctcccaactgtattctcagagtagccaatgcctgcccccttgagcctgtgcccgacacccccagccatgctgcaggtcctccacccaccctgcacctccccgccaggccagctctcacccctacatccccctccaggcccatggcacaggacagtagccacagagggccagacccatgatccatgtctgtgggccaccttccacctacaccccccgctcccatccaccatttagatccagtggaaatgccgccttccccacaatctgtcctggcagctccctcacccctcccctgccagctggaagtgcccacccccactcctctgtgaccgcaccctctactccaccacaccacatggtgactgggcacgtgactctcctccccactggatgggacgttccctggaggagacgtggtaaccatgtagggccccattgccagcacagaacctggcacacagtcggtgcttggacgggcacacgggtgggcagatggtgggcacagacgcggcaatggccacttcccaggcacgtccagcgtgtgtgcggccgagctcggaacggggaggtactggggcgggtctaagtatcccggatgaagcgaagagagccgcccatgctgagcacacaagccccggagtctgctctgctgtccgccaatttgagaagccgtgtagacatatcagtatttaagggaaggaaagccatcggggagggggggagaggcaggtgggggaagagcaaatgcgaggatggtcccggggtgctctcggcaccaactgcagtgccctcgcccagccgccgggcccgcacggcagggccacggccgcccggcagccccggctccacgtcttttctcctgcgggctcggcagccgagagtggagggtgcagagggctccttgtgaggacctgtgggactcgctggcagggcacaggcccggggcagcagcgttctcagaggtaactcacaggcacctgtgcctccagccctcaccgtgacgacggggataccaccacctgtccctgggtgggaaacccgggctcccaggcacgggaccatgtctgaagctccgatctctggggcagcctacagcctagggaggaggctgagctggcaggaagtcaggcaggcccctaggaggcatcctcaccgaggacctgtagaacacctactcacacccggggcaggcccatgagaggcgaggagcggcaggaggcccgtgagggaggggagacccagaagaaaaggagtagcaggtagatggagcagcgtgcggaagcacgggtgggaaggtgggatccaggaagagggcgctggggacaaggagagggccctgctgaacgcttcctgacatggcggagggcccattcattattcatccaatggtcacagagcaagactcacctcccacacctcccaggggcaactctgccgctgcatcaggcagcgcacacagcagcccggccgtcccccgttcaggtggcacacagcagcccagccatccccaccacagggacctgaggcccaggcactttgtggagcgcccagcctacaagacttcagcgcagacagatcagggccccaccaatgcagtgacagggcagggaagccctccaaagccaggcctggggacaagacactgctctgggcctggcccaggcacagagcactcagtacctaaaacttcgttttctgtgtttactccctcatgcctgtgtcacggtggctgtgaagcagcagcacagtccctgacggactctctggaggacccggccgcgctccagggtggcccaggcgcacagcgtggctggggagggcagcgccacaggcagacttcttgggaagggccgtgatcccacggcaaaagcctggaggacaggattcccggcggccagggctgccttccaggggccctgcgtgtgctccgggcagtcctagcactgagcctatcctgtggaaatcattctctctggccaaaccctgtgcccgcaccaggctgcaggaggcagggccacgtgtgcctggcccctccatgccccttcccaaggcccacagatggccatctcctccctgacaaggccctgatgcccagcaagactgagagcccttcctgggctgcctcacaggagccccttatatcacatacctgagaagggtctagtgtctagaacacatgaagacttaccactaaccaacaaaacaacccatttacaaagtgggcaatggatggggcagacacttctccagagaagacagatgcgtggctgataagcacagggtgaagttcaggaccactggcctcagggtaacgcaaacaaagccacgggagccactccacacccgccaggacggctctaacgaaacgtggaaaatttcacacccgccaggacggctctaacgaaacgtggaaaatggcggcaccactgtcacttctctcacgcccaggagcgttcatttgtgtcctcttagttacgattagtctggctagaggtttatcaattttatctcacagaaacagattttggtctcatttacggaactcaactgtatgtttgactgagatgaagcaacctgttgatctccggtggggccgacagggagaggggagcagaaagccaggcacgggctgggagccctcggcggcgggagccgcctcaccctggaagacggagctcgcacagcagcatgtgcgctgcccagacccaaactggaacaggtgtggggaccctgggagagcagcctgagcgcgagcacagacgtcccggcagcgctccagcctcagcgtggaccagccccagcgtggaccagccccagcgtggaccagcctcagcgtggaccagcctcagcatggatcagcctcagcacaggttggcttcagcatggatcagccccagcgtggcccggcttcggcatggcccagcctcagtgtaggccggctggccccatgttcctctgcctacaaggtccctccctcctggagtacaggcctggcctaccagatccactcatagccccaaccttcatgaaacattcatgctaatggtccttgtggcaaactcactagcgcagcataacctttaaatagagaccttgcattcggtttaatttgggaagatgcagggtgtgctcccaggggccttccctaatgccacaaactaataacaagaggaggagctgggtaactccccccaccgcaattctaattaacgaggctgccgctgagtgccagagtgagggcgtccacatgcgcgtgcacccgccgcctcatcgccaactcacgtggcatcgctgagtctcagctgcaacctgtgcccgggaggtggtgaggctgaggcccagagcctcacagaaccctggctgcaaggtgagggctcacatcccagggctccctggggctgactggggcagaggctccaggtctccaagagatgagagggtgctgaggtcacagctgggcatcctggccagaggccacctttccgctcaactctgcaccctctggcaccaggaaggcttctggagtggctgtggcttcctaaggaggcctcggggggatcttaggtggagtccactctccagcttcctttccagcctggaggagacacaggcgctgtgggccatggacagcccccttggctcacccagacatttcctcgtgagcacagatgtgcgcctgagctgggaaatgctttctcctcagaaaaaaacagcccagccggagggcatgtcccggccgaatgttcgcctgatgcaccgcccctgggatgaggccgctgcagaaccagagcagctgtgcttggaggaaccggggcctcaccaccagggctgcagcgtgcccagggccgccactgctggcctcacgagcaccgctgggtgcctgagcacctgccccaccagagcgccactgctggcctcacgagcaccgctgggtgcctgagcacctgccccaccagagcgccactgctggcctcacgagcaccgctgggtgcctgagcacctgccccaccagagcgccactgctggcctcacgagcaccgctgggtgcctgagcacctgccccaccagagcgccactgctggcctcacgagcaccgctgggtgcctgagcacctgccccaccagagcgccactgctggcctcacgagcaccgctgggtgcctgagcacctgccccaccagagcgccactgctggcctcacgagcaccgctgggtgcctgagcacctgccccaccagagcgccactgctggcctcacgagcaccgctgggtgcctgagcacctgccccaccagagcgccactgctggcctcacgagcaccgctgggtgcctgagcacctgccccaccagagcgccactgctggcctcacgagcaccgctgggtgcctgagcacctgccccaccagagcgccactgctggcctcacgagcaccgctgggtgcctgagcacccgccccaccagagcgccactgctggcctcacgagcaccgctgggtgcctgagcacccgccccaccagagcgccactgctggcctcacgagcgccgctgggtgcctgagcacccgccccaccagagcgccactgctggcctcacgagcgccgctgggtgcctgagcacccgccccaccagagcgccactgctggcctcacgagcgccgctgggtgcctgagcacctgccccaccagagcgccactgctggcctcacgagcgccgctgggtgcctgagcacctgccccaccagagcgccactgctggcctcacgagcgccgctgggtgcctgagcacctgccccaccagagcgccactgctggcctcacgagcgccgctgggtgcctgagcacctgccccaccagagcgccactgctggcctcacgagcgccgctgggtgcctgagcacctgccccaccagagcgccactgctggcctcacgagcgccgctgggtgcctgagcacctgccccaccagagcgccactgctggcctcacgagcgccgctgggtgcctgagcacctgccccaccagagcgccactgctggcctcacgagcgccgctgggtgcctgagcacctgccccaccagagcgccactgctggcctcacgagcgccgctgggtgcctgagcacctgccccaccagagcgccactgctggcctcacgagcgccgctgggtgcctgagcacctgccccaccagagcgccactgctggcctcacgagcgccgctgggtgcctgagcacctgccccaccagagcgccactgctggcctcacgagcaccgctgggtgcctgagcacctgccccaccagagcgccactgctggcctcatgagcaccgctgggtgcctgagcacctgccccaccagagcgccactgctctgacttccacgctggatacccagccccatttacactcacggaggagcgttgggaagccagatgggtggtgtctctctatgtggcttccaagggctccagaaccttcactgggatcaatgaggctgcctcctcaataggagcagttgttaacgctggggaaggggaacaggtgtcagaaaccttttgaagatggcaactgctctctggagaaaaacgtgtgcaagtaacggaaatgtgtatgcagcctcaagcgctttgtggagaactgagcacctgccctgggatgctggataaagagcccctgcttagaaacaagcctgaatttgaaagttctccctacagaaagggcctccctccctcctatcagctccaatcctacatctgcctttttaggacatctgaggccacctcctgtccctgtgaagcctctcactgtggaagttaactctgctgggggagcttggggaaggctgtctgccagggctgctggctgaatcacaggcaaaaacaagcccccaggcggcccagtccaagggaaagtcccagtgtctccaggacaggtggatgtgaggatggcatgggctctacgtcagggaggcaggcggcaggggcaggggcaggggcaggtgacaccattgtgggcctggggccagaacgggatcagcttatggaagatacacgtagctgagaaaaagcttaagccagaaagggccactgcagagacacgacaagtttaaatcacaggaaaatgcttcgtacttaggatgagggtactatatttcccctatacagaattactcccataatttttcaagataaatgaaccgatttcctttctcgtggttattatagactcgatctaagtttcgtggagtggaatgcacgggggacttcactgctctgagtctgaagtgcccaccttctcctcatccccgcccccaacgcccaaaagatgcccccatgggtcatatggcaagtgtgcagacagcagtgacatgcaggtgactgagattctaaaccacccaggaataaccctagtaagcagtgggcaggacccacagtgcagggagggcacagggcttctgggggagccacaatgcaaccagcttgccttcccatgtcagtccgcagaccaaggcaatgcaagaggactggcaggaaccttggcaagctccctctaaagtttaccggaaaaaacattggagaatatctaagatcattctgaaagagaaaataacacaaaggtcacgacgtatcagacacactctgaggctctgctagctcacacactgtggcactggcccagatagaaaacaagcttacgccttccctctgcactgagattttcttctgttttttggaggagaagcagggatccaaatcctctacaaccaaggctcagacattatgcctgagaaatctattttctgggcgaagaaaccatcttctcagctactttttctaaaatgcagatgatccttacaaggtaacgacattaaatcaccagcatcttctcataagatctttgcaaactggtaaaaactgaaaaggctgggtcctcacactgggaaaggggacagagggaagatgaagcatcctcctcccacctgtccccactcagcactcggcagatgctttaaactccccagctgaatgcctggccctgggctaacgctggagccccagaaagccctgggtcctgtcctggtggatttcacagacagcctgatatgaggaagcccctgcaactgccctggccacagggtctggggtcagcctgcctgggtgtgaaccctggagcactctccaccactgccggtgccaacacgggcaggtcactaatcctggctgcccctgttcctcgtctgagtatctggggccacaaccagcttgtgggtttgctgccaggatcacagggggataatctgtgtaaacaacaagtgtgtactcatgacatggtgagcaacagcacacactggctttgcacgtgccaccgccacacccagggcagcacagggacgatggtggcggtgatggtgaaggtgcaggccccgtgaaggcagggagggaagagcgtgtctgcgatgcaggggcagcagcacgggtccagctcaattcccagggggcctgaggctccgctgaactgaaaagacatcctcagagggggagcagcacagggattgcttggaagggcgtgagaagatgtgctcagagggtggggacatcaccgtaggcagggcaggcccatcgggcactgagggaccaggcagagaccccccagtaggaggactgggcagggcagtgagcgcccaccgggtctcacacagcaggaaggaggtgggcccatgccatggactgtgtgctcccgctctcatgctgaaatcctaggagggagcccggggaggtgaggaggccaccgggcggagcctcgggggggggattagcaccctcataaaagggaccccagagctccctcgcccctcccaccgtgtgaggacacagtgagagggcgccatctggaaccaggaagcctcagcaaacaccagaccggccagttcctgatcctggacttccagcctgcagaaccgtgagcaacaaatgtctgcaagggttttgttttattttatttttttaaacagagacgaggtctcactctgttgcccaggccagtctcgaactcctgggctcaagatttccacccaccccagcttcccaaagtgctgggattacaggcgtaagccaccacgcccggccaacatctgctactttaagcagcccagtctgcggtgttcctgttagggcagctgaatagacagatgcgcagccacagggtctctgttccctcagacaacagcctagaagaggcactcaacaaatgcttgctgaattagacaacttccctccaatgcaagaggcatttaaagcaaaggttgctccatgtgacacctgctgtggccagcacgattccttccactctgtggagaagcctcggggggcacctcggggcacgcactgaggatgaggctggacgcagggaaacctgagctggtgaacgggcagcgagcctggaaccagccccggggctgctgaggaagatcaggcccctgttctcacccagaatcacttcccagaacagcctggatcttcccagcacacgaactcacttagctttgtgagactccagggaggctccccgcttcctctctccaccctgaggaccaggcagtgaagcacctgcctgtggccacacagcaagagaggtgacaggtgtggctgagggaagggaccagttgtgtgggatggaagggcgggcgcaggagccccaggcggggggcccaggagaggccgcctccagggctggagaggaggagagtgagctaaggacacagtctcagactttgagccattccccagacctgccccagacacatccctggccccaaagagcctctccaagctcaggacacctgcacaccagcgcgcgcggggacatacatgctggtgcagcgtgaactgaacaggtttccagggaccaggaggctgccagcagccatacagaaccccggtgccaccagccatacagaaccccggtgccagcagcaagcccctccagcatgccaagcacgaagcactccagtcagaagtagcacttcgtcgtggagcaggatgggtccggaaggtgaaatgaggtactgtcagttaccacaccaggaggctctcatgatcattcatctgcaggcactggccatgctgctggatgtgaccagacagattccgggctgggcacagccatgaggaccagcactgacgaggggctcacagctgcctggtccatcttcagtagcagcaccagtgaagatagaggcaccagccacgcctcccgtgtgtgccgggccctgccggtctacacacagctcctgggcatgcagggtcccccgggtctacacacggctgctgggcgggcagggtccccccgggtctacacacggctcctgggcgggcagggtccccccgggtctacacacggctcctgggcgggcagggtccccccgggtctacacacggctgctgggcgggcagggtccccccgggtctacacacggctgctgggcgggcagggtcccccgggtctacacatgcctcactgggagtctcttcagggaagctccgccggtgtcctcagcctcccatgagaagccagaggctctgagagccacacggaccacaggctcctgcacaggagaccccagagagcctagagcttcttcatgggcccacgggacctgccctgctcacggtcgccagatttcagaatctgtctgtaaagcacctgccgctaggcccgactcagagtgggcctcgacacccttcccatttcagagatggacaaagaagggtgggggacgggaagcagcctgtccgggcctcagtgctgctgtagccacggcccttggtgaggcagacttggcacagggtgcccctgggagcaaggagcaggcacagaggggccacaaagggaaatcagcaatcaaggaagatgctgcttaatcagagctgagagcggcgtaattccctctgaatcggaaaataaagcttcactcctcactccccaaagtctataaaatattagaggatattttagagctgagagcggcgtaattccctctgaatcggaaaataaagcttcactcctcactccccaaagtctataaaatattagaggatattttagagctgtaatcaaaagactcccatctccagccactgcgggcctagctaattaggggggttcgctaatgatacgacgatggcccaggaaatctctccttgcgatattaattgcatttaaagaaaaaaacatgaattgtacttatgcttactaattagtacgggtttgctaattaataataagaaagtcagagtgcctttgtcttgtcattggcaattaactaaagatttaaatttttcttttttctctcttttctcatttcctaaataacaaaatgactttgggttggaaaatagcaggtaaaggagctgcaggctgggagacgggacgggcactagggccatgtcccagaccactgtggacagaaggcgtgagtgacacagtcagccctgcctagaatgtggcttctccacacaagccctgagggtgcagaccacctaggccccagcctttccagggacaagggagccccttccccagacagcacccactgccgagccagtcacagggaactgggtgggaggggcctcagagccagacctgggtgactccagccatcccagctcagggcgagctcccgctcaggttcctccaccataaaatgaaaagggagtcaggctgtcccgcagcccagagacccccttcagacaggaacatgcacctgtaacccccgggaagaagccatgacactgagggctctgggtcacacagagaaggggcaacctggagcccagggctgcacagcccagtgcggtggcggggggcaggggagggaggccactggccttcaggcatgcctggcaggggccagccccaaccacggtgtctgtagcccccttgcctggcactgctctccccaggacctcctctgaagggctttgcatggcaagaggggcacacagccagcgagacccctcctctcgtccctcgggagccctgcggctccaaacaaaggacggggccaggaacaggagctcaacccagggaggggtaaaatcatgattctgcttgggggcaatcctcccaccaaattcgaagtcaaatgctgcagcttggggcccaggcattagcgcttaaacggtgctgcgtacgatgaataaggaacagaaattatatgggctaaaaaagagaaaaaacacaggttgaaaagcagccaaacctccagcccagcgctgcaccaagcgcacctcacagccccctgaccagaaccagatatctggagaagccagcactccaggggcggccacacccaccccacctgagggcccaagaccagtttctgtctctctccccacaaaagaggactggagtgagcagctcctccaaaaccacctgcagccagacaagggccgatgcccgggtcaagatgccagctccgaggcgtccgtgcctctgttggacatggggagtccatgctccagggcagctgcaggtgccgggcaggtggctcagccataatgccgagggcttggcctgtgctcagacaactccatttctaaccctcctggcctcctgcacatgcagaagcatggcccccaggcacgtttcaattcaggccaacagtgaggcagccagcgtgttgacacacagaacaccagggtctccacagggcatcttcagatgggagcatccctccacccaccccaggctgttccagaggcaacaggaaaagggtcctcactgaagggtccagaaagctcagtcactgagaaggaagcaccgacagccctcagggctgggaactaggaaggctctgggtgtgtcccccaccaaccccctgccaaccccccgccaagcccccacacaggcagaagaggaccctggcatccttcctgaacacctgcactcaggggaaccagaccccacagtccacagaccccctaaccccactcactgctggacaccagaccccacagtccacagagtcccctaaccccactcactgctggacaccagaccccacagtccacagaccccacagtccacagagtcccctaaccccactcactgctggacaccagaccccacagtccacagaccccacagtccacagagccccctaaccccacacactgctggacaccagaccccacactccacagagtccccactaacccgctcactgaagcaggagcatctttcaggcctgccctgagccatctcagatgagggcagaggaatggaaaccgagtctcagacctgccattaaacaatacagttacaatgggttcccctgcaaactacatcagcaatgaaaggtcacagcagaacacagagaggaaaataaacaaaacaacaaccccaccccccagtatttctacagcctaaagaaaaacatggttgatactccaatttctccaattttaaaacccagacctgagaaaggcctgtcctggagcccccaacagcctgattttccctccgctgagcaaagcgtcacatctccgcctccctccctccactgcgctcccctggcaaacccgccctggtaaaccccattccccatgactgtgtctgctgggaagcacctgagcgtggcagacagaagcctgacgcccaacctggctccaagtttacaccacaaacctcagcgggactgcggggaccctcacaggccagtgcgcctcatgcccacttcaggaggagacaggaagctccagcaacctgctggccccagcccctttcgatgcccctccactgccccagccctacatcatgcccgtcactacagtaaggctcccttcagcataaaccgctctcccactgcccatcggtaaagcgaatcttccctcccggctccaggcccagcccctgaccaggcccttctgggcctctcctctcatcaatgaaacgccggccgcagggcccagggcaatcctctgctccccttccgggtcttctctgcagtctgactgtcccctgaaaacacttccttctccagggctctgtgactgcacctgccctccacggagtaccccaactcatggctgctccccaagactagatgccaggatgctggaatgccccaaagaggcttgagcctccagttctgacttctctgctacctactcattcccaacaacagaaacaccatgcagagcagatgggcacctctgaccccagggcaccgactcaaagcctccagccctgtgcatccaacgtgtggcaggcgtgagactcccacacttcaccctcaatctccccaccccataccatgagcccacccggggcggaatgccgaagccgtccttgattcccagccctcacgctctctacctcacctgcatctcccttcaacgcagcggactcggaccacgcctccgcacgccattgcagtcctagcccagggcacctgcgtctcccaccccggcctgccacttcccacccattgcggccctgcacagagcagccaggcatcctttacgaatggacaccaggttgtgtcaccacctcctccacccatgaaaccacagccctgccgtgaccacacagggcccacaaggttggactaccaaccaccgcggaccccgcttctgtcacccctaacctcactgttgggtccgggacctgcctgccccaccatttccaccaccaacagtcgggtcccccaggcttggctcaggacgctctgcagagcggccccgggagaatgcggctcctccattcgccaccaccggaagttctgtctttcactctcctatgggccactgactactcacttggcaacagtgtgcctccaggagggcaggagcctgtgttgctggctgccgcgtccccagcaccaagaagaatgtccttaagcagctgctgagtgaacagcgaccattccagaggctcaggacagctgttgccagcccacctggccttggtcctgcagatgccagctctgcccagacccgcgcggtgccctgctgttgcctctctgcgccgctgggcagcttcttccagggtctgcagacagccctcgcccattcccagcctaggccctggtgcccgtacctctcaagacggtgatttccaaccccatccaaccctgtcccatgagaagggcctgtaaccatggccgcacccacaaccgccacaggctgtgctgccagccccagagcctgtcaagcaatgaaccctcagcacacccctgccgggtggagaggaaggccctgaggccctgagagccaggacaccggctcacagtcacgagctggcaagcaaggatgcccgacgggagcctcgacctgggctgcaggccctggggtccgtacaacgccgacagcagctctgcctgtgacccaggccagcctgacgcatggcccagggcagaacatgcagacacacgcacgcacgcatgccccagggccgtccttgtccttcacagacatggccaaggccagggcagcatggagggaacctacactttgtttaggccaaaacgcttcaaaagcaaagcccatttgttccctaaaacagtgggaagcttttgacactggaggtccagaaaccaggagagcctgcctggtcccccacgggcccacactgcgggccccccacccaggctcggaggcagccaggagagtggggcccatgtgggctgaggagaaaacagcttaaaagcacgcctgctgcattcacagagggcagataagcactcactagagacgtccctctcctggtcaggacccatgctgagtggcgcccaagccccggctgaggcactgtcccactggggactcgggtcctgtgtggtcgggacaggggtccatgaagccacagcactgatgtccagttcgctgctggacagacccctcgtaggctctcacacctgctttgccccgacaccgtggcctcatgcggcaaacatgtcactggccccctgccacaaacacggtggtggggcccgaggggctgtgctccccgccggcgcatgccacctgtcactagtagagatgggactcaggctcctcacacacccttccccgctcaacgcagcttccgacgacagaagaggcagccatgcactggcgcctgcagcctaaaggcttatggggacaggcgtccctgcccagacccagggtccaggtgccctgaatcccagccactcccgcgtctgactcaccatgtctgctctttgtttctggcctcccagctcctccagggcctgcgacagctgagcctgcaagacaagacaggattcggcctgagactgtggtgggccaggccccatttctaggactgcagggaacacaacccccaccaccccgcagcctccactctctggggagcaacgggacccaggagctgggaagtgggcagccagagggtgggcaggggccagtgtggctgccccgcgaggccgagagcccagtgatggagacaactgatggagacgaagaccgagtgggctgcgggaggcttcacagaaccaaggtccattcctaaaacctgcctcaggaaactgactgtgaatggggtggacaggggtgggcccaagagggactgtggaactggggagagacggagggaaaggttcagcatgggactttcagtcagaggaaatcaattcactctccctggcaggctcgtgcttaaagaacagaatcaggtgaccttccaggcagaggccccacctcagagcatctcctccaccacggccacccccaagcaggaccccgacccaggcaggaagggtctcctgccccgacacactccccaaagggcaccaggcttgaccccacactaagggtagaaaagccagcaatgaaaagccagccgcctcctcctaacaggcctcatggagcagcaaggctgggtctggttgtggggccaggatgtcagcagtccagctccctgctggggacagtgaccctgcacccatgacctgcacggtgcatggggctcaggacctcggagacccccgccctgggcctctgcccctgcggttcctaccttcccccacatcctctccctctgccccttcctgactccttcccacgaccccgcttggctccccactgcccccaccacctaaacacattgcggctctgtcctagaacctgggaggaagggcgaggcagggggccttgtgagacccccccaggccacagcacacaggaaagtccgggaaggagatggagggccagcccaggagtgaggcaggtggctgtggtggggtgtgggatctgcggggtggaggcccagcaggcctgagggtgagggagaaatcgagaggcaggcagatgcctggcccagcggcaactggaaaccaccaggcaagtcaccaggagaaacgggagagaggcggggaggcgtgtgtatgtgcgtgtacacaagtgtgggtatgtatatgcacacctgtgtgtggcatgtgcacatgtggtggggatgggggaagtatgtttggagacacagaaaacaaggcactacagcccctggggacacagcctggggaaagtggctgaggcaacagcccacagtcctcaacctgtccgctctgcagaccatgggcccccaagctcccctacaggcccagccagagccaggctctggacttcccacgggctatcctggtgcctgctggttctggacgccacagcagagtcaaacccaggctccaggtgctcccgtggaggctgcaggtgtgagcacctgagcctcccaagcctctggtgtggggcctcactcagtggggccaccggagggacccccattgcccaacacccctgtgcaacgcctgtggatgaggggaaggccttgagctctgcccatgaccagccccgcctgctgccctcacactgccctgggggaggccctggagccagcctagccactgtcatcaggaggcaggtggccgtggccacgctgggctgtgtggaccccacactggaaagcttggtgcctcgaggcctaggagcagcacactgccctcctcacagccagctgaaccctggataatccggccactgctggggtcaccagcagctgggactgggaacggcagatggaagagggacatcccccaaactgggcctagacacaacgcacttcaccgagctgcagccctgggcactcccgggggcacagggagccgggtcggggcatccagggcaccccatgcccctgggcagagcctcagcacatgggaggcagctgcagtccacactcaggctctcctcacgcagccctacaccccgcccaggtctaccagcacccacaggccaccaggccagagagcagcccaaacaggggggacgacaacaaggctctgaggtggcctgggcagtgagacgcacccatgagagctgcccgcacccctggcaaagctctgagctggcctgggcagcgagatgcacccgttagagccacccacacccctggcagcccgtccatgtccgccacacccggcacactgtcctgggcacacaggcggctggcacgatgggcaccggcctcaggtgacagctacaggtgaggcacatcgtcatccccatttacatcagttcacatggcaaccttgcaaggtcaaaggcactttacaggagcagcttagaagaggcagggtcgtccggaagcagcagggctgagagctgtgcgcgaggcccggaccaaccacgctctcctgtgcctcccgacacagaatcactgcagggtggagccgtgaccacggtggccagcccagggtcctgccgaggccaggcaggccacagcagcctcagccttcacagcctccggcgccacgcgggcaggctgcaggcattttccgaaggcttcatcaggtttctgtgaggacagcactgagtgatgtgtgtctgaagacaagttcattcacaagcggctcatcagcctgaggccgaggcgtccacctccgtaccagccccattcagcctagcacttccatcgatggctggaaaaaacagaacgcatgcatctgaaatcctcacatgacccagggcctggaaacacagacaccagtgagatttctgatacatcctcaaagccacagtcgctggcgaaaggtgactcggagccaaggagccctgaactcagactcgcgcactggtctcgggtacctgggcagggcctgcttggagcagctcccgtgagagtgcagccccgggatgcggccaggaggacgaccgcacgtcagcaggagcagctatggctcggctcacacgcagggccctgggttcaagaaggcagacatcgacgagctgagtgctccccaggaggcgaccaggacagcagagggcatcacaggagccatccagccatgaagacagacggcttacagacagtgagagccacctttcactgaagactgaacacacaggtgtcactcagactgcaaagagacatccacggggtcctgtgtgacccaggaagttctgtgtcttcgcctgcattaggggggttacacacacactcgctctgtcgtccgacaggctgaaaacttacaatctgtgcactttggtgtattgtgttatatttccattaaaacatatactctagcaccctgggggacgaattagggaggaaaagaaggacggttctgttaccataaagagaaatggtttcatccaggcaccgtgctcatgcctgtgacaccagcatttagggaggccaaggcaggacaactgcttgaggttaggagttcgagaccagcctggacaacatacagagatcctgtttctataaaaaatttaaaaatcagctgggtgtggtagcacacaactgtggtcccagctactcagggagctgaggcaggaggatctcttgagaccaagaggttgaggctgcagtgagccatgactgggccactgcacttcagcctgggcaacagagtgagaccctgtgtcaaaaaaacaaaaacgaagatgtaaaacaaaacaaaaaaagttcgtttgtaaccggctgcatcttcccaaatggatggccaaatgggacactgcacaaccctgagtcagaggtgactccaggcggagggttctcagcagagcagccaccagacagaagctcagcacgcagaggggccggaattccaggagtgtgaaatggagagcacgctccatgggcatggagatgggggagcggcagggaggcaggagggagctcaggtctggcttatagacattctacagcacaaggtttgtgggtgcaggacacctcagccacctctcactcataacctgaaaagacacgtgtgggtgctcctaagaacagagccatggaacaccgagagaacacagacgagcaggccctgtggccattcaaggacacacactgctgtctgcagctccaacagggtaagtggtcagacatgaagtttccaagtaacaaaaaagaatgttttacatgggagcgggtgtggacagggcaggagggagttgggagaacgaaggtggctgtggcctggggtgtcagccacaatgcgtgcctgtcctgggcctccccaggttctgtggagggagggtgtgagaagctcacagcagagtcccagcaccgaggagcatttggcaaacgtccactcctccctcaccttattgttccaagaacacagctaaagtaagaaaaacaaagaaaacaccgaaacccgcacggcccagcacaggagagacgggacatcactaaacccgcacggcccagcacagaagagagaggacatcattaaacccgcacagcccaacacaggagagacgggacatcactaaacccacacagcccaacacaggagagacaggacatcactaaacccgcacggcccagcacaggagaggcgaggcaggacattggggtcccgagagacccaagacgacgctctctgtgtgcgcagaggaggctcccagatggggcaccaggaagctttgggggacaggctctcatgggctccaaaatgcgctagaacttctccttctggacaagctgtaggaaccagcacagacacaccccccacctcagtccccagacaccagatacaacacaaggaacagtgggattcctgcgagggagggcaggcagctcagagctcagagccgcgggaggggatggggtgagtcccccaggacgcaggccggggcagtgccacagacagagcccagcaggcctgctgggtgaggagagaggaatgggaactccaggaggcacagatgggcagctgggcctggcaggccagcaccagacagagggaagggacctgaacagacgccaccagagaagaggcgccgaggtggagaagcacgggaaacgctgggcacgtcagtcactggagacacacagattgaagccagggctaaatgtgctgctgccccgctggatccagataccaaagccgacagtgccacagcggagcgttctcccagctctggtgccgacagcctgtgcagtaacgcgtcactggaccccgcgtgttgccacggtatggccgctgggaagagcctggcaatgtcttaagaagttagggcccggcccggtggctcacgcctggaatcccagcactttgggaggccgaggcgggtggatcacctgaagtcaggagtttgagaccagcctggccaacatggtgaaattactaaaaatacaaaaattagctgggtgtggtggtgcatgcctgtagtcccagctactcaggataccaaggcaggagaatcacttgaacccggcaagcggaggctgcagtgagccaagatcacgccactacattccagcccgggcgactgagcgagactctgtccccacactgtccccgccaaaaaaagttaaaccccacaatcctactcctggatgtagagcccaaaggaatgaaaacctgcattcacaggaagtctggcacgcagatattcacagcagctctgtcccagctggcaagaatgggaaaccaccctggtattggtcagtgggtgaacagacgagaccattttggtagagtctcaggatagagaattattttgtaataaaagtaaatgaactgctgatacaacgttgatgggtctcaaaagctctgtgctcagtcagagatgacagacacagcaactgcaggactctgtttacgtgaagttccaagaaagcccaaaacaacagtcacaggccccagaccggtgtctctacgagccaggggtggcaggaaactgacggtcaacatggatcaaatcatacagataaagctgggggattttactgagtataaatcatatttcaataaggctgcctttaaaacatggaatccccagagctcggggagaaccacactcacaagggcgaggagctggcacagcccgtgtgtgcactggagagcagctcccgcagggcctcagacagcgcaactccaggctggtctcggtagggttcctccaggaaaccgcatctgtgatggaggcagtgggtgggcggcagagcaccccctgtggaaacaccctggacagtgcactttagcactgactgtggggctgcccagtcaccttcgggggacacagacacctctcactctctgggtgaccgggtggagcccccaggccctggccacagcgtcctcacctctgagacaagagctccccaagctcaggttggctccgcaaggcagtgtagggtgcagcctgttctgatgcggagatggtgggatggagagagagcttcccaaggcccggggtgggggctgggctgacggctgggaacaccagatgccaagcctgctcgcaggcaggccaggcacttccccagcctcagcccctcctccacagcccaccccgggctgggtgcagacacacaggaagctcaggtgggaaggaacacggctccatcccaaacagcctcagacgcagacacgcaggaagctcagggggggaaggaacacggctccatcccaaacagcctcagacgcagacacgcaggaagctcaggtgggaaggaacacggctccatcccaaacgacctgacgcagtgctcgggttccccaggagaggccaagcccactcggagccaggcttcaggggcacacaccagggagcactgaggggtgcggaggctgtggggagagggtttcatcacatggcgggaaaaccagtacgagcaggcccccagcgcagccacgccccggccccgcaaccctggcaccgagtgaccagggagctgcctccacccaagcagctgaagggtcacacacagctctttccgggtgggaccacgtgtcccgggtggctacgtgtgctgagacacgagccccgggccctggcgcccttggcaccaccgaggtgctgcacagaggcctcagccgggctatttttatcctgaggtgagaagttgctgcctgtgatccaacactcctgccagccaggacatggcagaaaatggctaggacaggcagccacagaccccagcagccacaggacagccggactgaggaggaccagagggcaccaggcacagaccccacacacggtacaaaggctggagctaggggaaggcagccccaccggtggtcatggtcacggtcacgtggaaaaggatgggacggaagctcaggcctccaccttcctggccaggtctccaagtggcttgtgacacaacgtgaagaagcaggaggcggcacaccacagggtccccacagggctaaccaggccacagccccagcacctgcccctgggtgaggctgtacacagaagctctccctgtgggtggaggtctgaggatgactgtgagcccagcgctggccacagagcacacaacaggcagtcagtgcacggtcaggggctccactgcagcccctgatgcaaggaaggctagggggtggacgcccaggccctgggggatgctctgagggtggcagcaggtcctcccatggtggagaggacagagcctgccctgggcttattcctcacgcccagcaacgtcagctcctgtgctgggcagcggtgctctaagtgtgtgctgccgggggtggcaccggcgtgtcacggggagcccggctcagcgcagttctgtactgcacagacgccccgttctgggaatggagccagcacctcgcgattcccactgaggacctgtggccacacagcagaggctcccacagcccagactccagggtggtttccataaaccccttggcccacttttcttcactgcatgatttttaacaggtttttttttttttttttttttttggctttatctctgcttcgtacagtacagtcatctcaagttctttcaatgagggaaacatcaccaacacactcacaagtattgggcctggtgaacaacccgaggccctgaagatcaggctctccccagccctcctggagccaaaccacccacggcagccaagtgacagcacccgcagagctgcccgagcctctgggaggtcacggggaggaagggaagacggaaacaccgtgacggccacttctgcctaaatcgttaggaactatttcagagtccctgcaacctgaaacggggattctccacacacctccacacggccagcagcgcagtaatcgcttttaattaaataaatcggaaacacaaatcaggccaatgtgttgaatcaaggtggcgtgcactgcgtatttatagctctatccacagaggactcctgacacatgctacgggctcccgcagccgctttattaaatggaataaataacaccgtgcaagacggcaaaacttcaccagacgggtctggggttctcccaactcaacactgttttcctgcaacgtctctgctagaatgaaaacatggtccagatgagaacagactggtgtctggtttagctaacgggtgggtggaagggaaccactctcagagcgatgctgcatcctcccgctggcgactaccccgagcccacctggcggtcaggtagcagatcctcacctgccccgagaggcgccttccccaggggcatgcgcagggccgggcaagcttccagggaaggcttgcgaggcccgaggtcagaagacataggagtgtgagtgggggacagaggggtgaacagaggccaagggagagggaaagatggagacaggaactatcagacatgcgtgcagaggacagaaagaaaatcaagaagggaaaaggagacgggaaacagaaagaaaagaaaaaccgggtggaggtagcagggagagagggaggcagggggttcggggggagcacctgggctctgtggggtcaggagccctccccggctggggcgatggcggccccccaccccccgaccgtgaggagaagaggagacgggcccttcacagaaaccaacagccagagacacgcggcatgtgcagggtctccagagcagccccttggccctccacgggggcatccctggcttgggctggcgtccctgccccaggggctccctgtgcacagagggtgcagccacccttgccacacttcatgtgcagccgcgccccaaccttccctggagcatagcactcctgctgggcccccgccttcaccttgcaaacatgcttagttcccagagttggggccacgttctcccgaacttgcgccacatccatgaggaggtggggagcccccagcagatgctcccctgaggcaggaacccagcccaggagctggcggcacccccagcctcccacccgactgtcacttcagggaaaggcagggcacaggctccgcaggtgacctggtcccgctgaggcagaaaggcagggacacctctcccaggctcctgggaggaaagagctgacgcggaggtgccccctctgatgaggcaaggcatcaggtcacgctgtcatgcaggatgtggtggtggctgctccacagaccccagagggcagtggcacctgcacaggctcagggaacagccaggggcctggaagacctctctggaatctgtgccagcagccgataccgtggctgtctccatcaacacagacaggccagtgcagcggggtcctggggggagactgcaggtgctggcctgcttctggagggtacccagggggatgggcagaggaggctgtgagggctcagggaggaccagccgtgtgaactcccacagtgaggactagtcagtgctggtggagtctgaccctgctctagccctgctgggcccaactcttctatgtgcctaattctcctgaaaccccaggagacagacaggaaggggagtaacctgcccccacaccccaccatgggaagggaggggcaaggtccgcaacatacatcccactagcagggtgagggctgaggctccaagctgcccggcaagggggcaagcacggtgcccaaacagtgccagcatctggtcaatgagtcctgaggtccctgacagccctgatcgccttaacacacaaaacaccagaacccaggactctggatgtgcccacggccaggcccgtgacgagccaatcacagtgcagagggcaagcacaggctggagaaatcgctcaacgtggaaaacgccagggacggcagaaggggtcagagaccctccccgcaaatctctcttcattaatgcttcacagggagccaagggtgttgcaatgagatggctattaacgcacttaggtttacgacagctcccaggtacagccggagctagcctttcccgtgacgactgaaggtcagtgtgcagccctccgcagcaggccctgcacgcacgggatggctagacacagaaaggaaagccaggagcgggaggaaggaggatggacagagggggcagggcatcagaagaacacaccagggggcagtaccagtgcctgagggtggtctcacacccagggttcactcttgtcaagcgtggtggtggttgagggctcacccataggtggggacacggcatagttccagggcccttcggcgtggcctccatgtgagcaaggggtagcgagtgcatgtgggccctgggcctggggcctcctgggctgggacctgtcattctcgccaagtgccatccccagtgcctgagcctctgtgcccacgccccctctaaaccactgaaccatctgccaagcagctttctagatgtagtttggcgacctccttctcccatcttccctgaacagctgctgggacgcccatgcagcgcagctccctgagaccctccattacaatcctttctccagaaattcagctcctcctaacatcccacatgaattatgtttgttcattaaatgtctcccctacccagcagctcggctccaggggccagaggctctgtcagactttccctggcacacggcccagcctgctgtgtgtgctcagcagcccggctggaaggtggctgtggtcacgcctgtgaggctggctctccatcgggggacccaggtcatcttccagctggtcactggctgaatgaggaaaggacacagcagcctacaacagggcaacaggccacaccgatgccatcatctgcatctccatctcaccgcagtctccaccatcaaggcccagcccagacacagtgacccttgagaccaaagagctcacagagctcggctgttcagctgtgctcgcagacaccacaggcccaggccctctgagatgtggcctggcggtgtcacacaccagctcggtgacctgggcatgtcccttgacgcccccaggcctgggtttcctcgtgagcgaaattcggatcacaacggcacccactccataggatacggtgacaatgagactgagcagtcaggtaaagggccaggcagagcagaatggtaaggcacccggcggcggcgtgtgccagcgaggccagaagaccctggcaggtatcccaccacgcccaggcggggctgcactgtgcccacggagaagtggtgcaaatcctgagaggagaacacgggcctttcaagctccaggctgggaacggtgtgctaggagcccccggccccagtgtagatgagaagtgtggatggggagtgtggacgtggcctccgcccaggccctgcgatacccagctccttcttcccactgcacaggtgagagctgctcagagctagacaagggcacggagcgtcacggtggcccatggggcagggaaaaggcagaagccaaggctgaggccacctctcctgggagaaccctggagccaggagagggatgcagcctggaggctgcaacaaggaggaacacctctcccagttccacagggagctgggcgccctgggcctcacaccctgcccgtcaggccccagcagagcctccccagcagcggggactagagccctggcaacaactctgagcacccggagaccaggtctccttggcagatgcccctcacaggggaaggaccttgagtgcccctttggcaggcatcatgaggcggtcctaaccagtcaaaggggcactgtccctctgtcatccgcttgcaggctgggaccacctgagacaccctgacagcggaggatgctgcaggtgccatcgtgagaattaacgtggatccacatgcagaggaagcagcccgtggacaccctccctgacagacacctgccagccgggaactggggaggcggggtccagacctccacctccccgccgcaggctctgccaaggcccaccgggaagaagccccacctggcgacgtgagccccacgcccgcggcccctcacctccatctcggcgctgtggctgtgcaccttctgcaccatatcctcagcctcccgcatgcgccgcgtcagctggggtgagtactcggccggggtcagctcgctgtcgtaggaccccaggatggcccgcataccgtcccgctcctgtggacacagagggcagctgatcaggacccgggacgggggatgaggtaatgatggagacggctcagggaaggccccacgagagctgggtcacgcgggggctccctcgtgaggacccaggccagcactcagagcccacccctgagggcccaccaaagtgaagagggccccagagttcagcatccccagacccagtaaatgccagcagccctggctttgcctcggcacccgctctgaccacgtcaggccttcactacagcgggtgtgggctccacctcgtaccggcagtatggctatggggtcggctgggagcagacgcctctgcccctgtggacacagcacacacaaggcgagggcgcacagtgggcagaagcccaggttccccaccccagcctgttctattgggtctgcgtgactcctctgagtcccagtcacactgggcccagggaaacgacagtgggcaggcccagagctgggtgagtccccctcttcctgggacctctgcccggacctgtcgagggaggggacagtgtgcaccaggaagctgctgcgttccaatgggacaggaaacccatcgctcgtccaaccgcccagggctctcgggaaggctgagtccccgcttttcagctctgggctggggagctccttgtcttcccacagagctcccaggatgtcggaggccacacgcagatccctacagagcagccaggcccagcagggctcagcttcctgggatgacactgaccacagtgtcagggctgattcctagagccgggcagaaacccctgctcagttgtgtcctgccagccagtcaggggccccgggagctgtgtgctgcctccagaccctgcgggtgcccatgggtcgggaactgagctgccaagatggcccccaaaaaggacgtgctgctgcggggaagtgtggtcttccctctggcctcccattgcctgcactccctgccccaggtgtgggcctgaaccacagcccccggacccttctggtctcagacgctgagtctggatggagcagattccaggcgcaggctggcgaccttctcctgcctgtccgccctgcgtgagcccacaggaaccacatgatcagggagccagccctccagacacccacccaggtgtgcgggagggcagcttccagatcttcacgggcatctggatgccctggacgtagattcagggtgggcctgggaatctgcccttctaacatgtgccccagggacatctaactgatgctctcagcagcctctgctgaggggctctgccccattcttgagagatggaggatgaggatgctggggtagtagagcccaggaagaagcggatgggtatctataagatgcaggttcaagccccagctctgtcctgaggccagctattcaacctccctccccaagtctcagttcctttgttgataagatgggaaatggggtggccatgaagactgatgctgtcaggaatgaactgtccagccagctgccctggaaacaacaggtgctcaagaagcgagagccaggacctcacaaacccgggaagcggtctccactggcccacaccccttcccaacacacatgctgcgcaaggggccaatgctccggcacagccctgcaccacctcattgagttgtggccagcgtgctccccaccaggtgagggcaggagagctgtggggaccgcccccaccagtactggctgaaagggcaaattcatggccctgatagagaccagctcactcaggcagcctggggagcaagacccccacccagaagcggagtgcacaaaactgccagggtcccttccgtgcggcctcctgagtctgcacgtacacaagctgagcccccgcccaggccccgcctggctcctaggagagaccgacccagtgctccccagcactgatgactgcctggcccctgccaggccctcggtctatcccccacaggcgaggagggcgaggctgcaggggctcaggaaaccccggcctgctctctcagaagaccctggagctcaggccgccacgtctggggctctcctgccgtctgtctcttgagccagggacacaggtgccaccctggtgtggacttcataattagctgatgacaaaaaattcaaaattcaataagtgagaaattaaagttacaaatccaactagaacgggtcacgtatctgtggaaaatttgtttgcacaggaaggtttatcgtgtgtcataatcttattgaaatcctatatcttcccattgacttttatcgtttcaagccagttaccggagttgtcagtaccaacgcgcggacgccgcgcaaggccggggcgggggacttcccttggtaaacaagctgtaattgtctcttttattgatcagtaaatctctgagagcttctcttcgtgacggctctcttcagcctaactccaggctagcactggctggcacagaagaaaagcattagaaagtttgttgtttgtaccctttcaagaacctgttttgtcaccggtagtgaaacagcaggcacggtgtgggtgtgacttgctatgactttttaacagctgactccacctgcgggcaagtccacttcatttccacctcagcaaatgcggtgattaactgctgaacaaacaggcggctggcagtgctgacgggggcgtcccagactcgctttaagaagcacccagcagagttacattgtccactggctgctcctccttaggtacagaaacgtcccggttctaaggaatagaatgtgctcatcatgcaacgaacggccatgtgaagagaaggtgagcagtcggcatcacctggaagaagtcagctgaggacagggcctcggtgccctggatacaccggccgatgggggccgggggcagcagtagagggcggctctgccctggcctgcgatagtcgggcagaggggctgctcacccagggaggctgcaggaaggatctgggcgccctgggaggcagcggtggggaagggcactccaatcagagggaacagcgttgagtaggcgcccagaggacccttgcgaaagagcaagagagataatgacgctcattccctcatcagcaggtgctccggcgcgctaattaccacagagcttttgagtataagccccaagcatgccgatgattcccacgcaatgagagacagattcccaaagaggctgagaacgccatagcagggggcaggacacctgggcagcaggggctgagacagtgggcagaatagggcccagtgcccttggaagaagaaacccagggcacagcccttgggcctgggcttgggaagggcaggggagatcagagcagcgagaccaggaagccgagacagagaccagggctgcgggtggtgagagcacccacaggagcgggagactgcaggacgccggccctgttggaggtgctgcaggcaggggagatatggacggaggcaccgcagtgggcagagaccggccccgtggcccccaagcagcggtcacttgaggtgtgcatgcccaggccagcccccaagtcagacccaacacacacacccaacgaagcccacatcctgcctggaccgtaactagatgtgtgaccttgggaaaaacaaagagcctctctgagtgtgaggacactcaaccacacaggagagggcagagaacgcctcagcctcactgcgaagttcaaatgcagcatggcacagaaaaccaggcacacggaacccgcatacacaggcgatgaatgcacggcagccacggtggtcacttctgtcctcgctgctgtctgcctggttcttccactatgactacagctgctcgtgaaagatggccaggagagcaggcaggtggggcaggcgcgtcccgcacgatggggacagcctctggccatggccacgcctggtgaggcaggcgcccagcactccctaagtccacaccatggacacagagggcttccctcctgggagtcagtggcagcctgaaggggctgtgtgaggcaggcaggcagctccatatgcagaggcccctccttagagccccagcaccaacccccactttccagagaagcccagaagtaagctgagtaccgcgtgccccctccaatgaagcagcagcccctcacccatcttcctccctcacccagcctccgccacccactcccgcccggcctctgccaccagtgctgtggagcctgcctccctccctccgccccctccagcccaaggccgaggcccactctgcaagggctccaaggctgttctgcacatgcgacattctctgcagggcctcttcccaagcccatcccacctcagctcagccacctccacccaactctgagtcactccacaacttctcctttttttagaaaaggaaatgtatggtcataaatagctgaaaagccctgttctaattacctctcccgacgcatggagccaccacaagaaactgaatagattcaggcgggaacgtggggctgcagacacggctctgcccactgacgccggcaccatctcctcgctgccacccgcctccccagagtcctctgcccactctttccccagacccccagtcaccagcctggacaggtctgctgtgaccccagcagcaagatcgccccagacaggagaaggccctgctgggacagaggctgggagaggcaggaggcctctctctggaaccctcatcccagctggtcgtttcccaaatgagcaggactctggcatccgtggggcccatcgagaacatgatgacaggcgaaagcggcagtaataagcgcctcggaggacccacgcgggtcagacagtcctgcgctccaatctgacacagaccagctgtgcacccttgggcaagggacctaacgtctctgaacccaccctccttgtgcaaaacgggggcacgaatgccccaaagagtgcttaaaaggtgcaccaggattaataagtacatggagacagcacccgtcaatggaaagggcagcaaggagggccacttacggccacaggggttgggggtgggggtcgggctgcccggcccagccccagccaccccccacacaaggccacgcctcgccaccctccacccacgcaaggccacgcctcaccacccccaacgcaaggccacgcctcgccacgccacagtgctgagtgcacatgaggcggcgtccctgtgctcggcccacgcctgctcctgggccggatgccctggcccccacaaccaactacagaacgcttcgcctcctgtctgtccctcgcttctctttcctgggcctgctgcccctaaacgaggtttttttttttgacaactgactgttttcaagtatgattcactcaggcagattttaattggtgacatcagcacagcatgctaatgctacatatgacttaagcacacgttacctcatttgatcttcagaaccgccaggcaggcacagggctgagggaagaggactcagcagctgcgagctgttgtggctgccctgtcgctcagaccacggaggggcagagccccggctggtgctgcaaacagaggagccgcccaggctgcggccctacagtcccggggtcagcgcccagcccggggaggcagtgccatggacagcctcactggtgagaccactggaagtggctctccatgatcggggggggcactaacccccgctctgggctgccggaaggaggaactcacgaggcccgagattgctatccacagccccagcgtgaccccagcattcccatcaaggcgtgcacccggccccggcaccatgcggcccccacccttgccttcctgcggctctgaccctgcagttcccagcagccttcagaggacggaacgccatgggcacacggcagctgtgagaccgagccgcagggggacgcccggccctgacatcatgggaacaagctagagcagaacaccatgaggaccccgcctctgtgagagcaaagccagctccctgggtcctctctcacctgcccgggctgccctggtacccggagtctaggggcctcctgggagggaggctgacccggtggctgtgggcagagacgaaggaaaacatcggacggacttcaggcactagttaaaaacacacacaagacaggagaaacttcatctgagacgacagcggcctaagcaaaaagaatacttttttttttttttaagacaaggtcttgctctgtcgtctaggctacggtgcagtggcacaatctcaagaatgaataacttagaagaaaatgtattaatttaatggttagagtagaaaggctaaaactgaaagtagcaagctaactaaccaacataaaaaatgaaaaaaaacaaaacaacatatgcagaaagtataggaataaaaataaagatgagagcataaatgagcaaatgtaaaaacaggtccacagaaacttcccgtactaaaatgcactgaggaaaaagcaatgaaaacaaaagaagaggcgacctaagaacagtgggatgaccgtgaaggtggaacctactcatgacaggaaaaccagaaggagaaggaggcgaggagcgaacacagtaagtatctgccgtgataatggccgagatttgtcaaatctaaaccccagatccaggaagctcagagaacatcaagcaggaaaaataccaaaaactccacacttagccatatcatattcaactgtggaaaataagacagcctgagaagggagagcccttcattatcaaccaagagagtgagaaatgcatcagacctcctgaccgaagccactcaggcagcagagaggggagggaggtatccaagtactgaaacaaaacagcaccagcctggaattctgcatccagcaagatgatcttctgtaagaaaagcagaaagaaaaactctcagcggggcacactggctcacacttgtaatctcagcactttggggagccaaggcaggcagatggtctggtgtcagaggagtttgagaccatcctggacaatgcggcgaaacctcgtctctactgaaagtagaaaagttagctgggcatggtaataggcgcctgtaatcccagctactcgggaggctgaggcaggagaatcgcttgaacccaggaagtggaggctatagtgagccaagatcgcaccactgcactccagcctgggcaacagagtgagactctgtctcaaacaaacaaacaaacaaaaaacactctcttagacaaacgaaaactgggggagattggtcattggcagccctggcccctgtaagcagtgtgaggtggattctccagagaatcccatgagaggtcagaaactcagatctatgtggaaagacagagcagagaagtaacaaataaggaaaaataaaatctactttattcatctgtttttttcgagacagagtctcactctgttgcccaggctggagtgcagtggtgtgatcatagctcactgcaacctctacctctggggctcaagtgatcctcccacctcagcctcccaagtcgctgggactgcagctgtgagccgctgagcctagcttactttccttagtctcgttcatctaatggacgattgtttgaagtataggagcagcaatgtgtggggtgacgatggtgcagggatgggtgaaatgaagcagcaggtggcacgggaggcaaggggaatgggcgtgttctgcgggaggcgcccaccctgcctgtgacctggtcaaaggccatctgaccatgggcttagattcatgctaaatgtatgctgcaaactctaggataattctgtgcttggctcatgcctgtaatcccagcactttgggaggctgaggcaggtggatcacccgaggtcaggagttcaagaccagcctggccaacatggcgaaaccctgtctctactaaaaatacaaaaattagccgggcatggtggcaagatcacgccactgtaccccagcctgggcgacaagagcaaaactctgtctccaaaagaaaaaaaaaattctgtgctaacagaattaaaaaattaaatcatataacatgctcagttaaaaccaaacaaagcagataaagaaaagaagatttaaaaaaaacaaagaacaagtgtcccaatagaaaagagtaacaaacatggcaggtattaacagtatcaacgatcatttcgaatgtgaatgatctaaacacaccaattaaaagacggtcaggatggattaaaaaaacaagacccaattatatgctgtttataaggaacccacttaaaatataaacacactttgaaaggaaaggaagaaagctagaccacactaagcccaaataaaagaacggtggagcagcttgatcaatctcaggcagaacaaggaaacgatcaggaatgaaaaatggcactccattccgataaaaaggtcatttctccaagaagacatgaccgcccttaacatgcatctacttaacaacagtgtctcaaaatatgcgaggaaaacctgaaagaactacaaggagaaatggctcaattcactgttacagttggaggcttcaacaccctcttatcagaaacggacagatcccgcaggcagaaaatcagtgaggacacagcagaattcaatagccccatcaatcaactgggtctaaatgacaatgacagaacactgcatcaacagcagaatatatattcctctcaaactcatatggaaaatttacctagacagaccacatttgggccataaaacacacctaaagaaattaaaaagaatataaagtatataaagtaagctctcagaccacactaaaattaaactggaaatcagtaacagaaagataactgaaaaatcccaagatatttggagactaaacaatccacttgtaaataacgcatgggtcaaagaagtctcaagagaagtttaagaatagtttgaacaagaaaatgaaaatacaacctatcaaaattgtaggatgaaacaaaagccatgcttagaggaaaatttatagcattgaatgtaaatgttagaaaaaaagaaggatctaaaatcaatcaactaagcttcccattaggaaactaaaaaaagaagaacaatgtaagcctaaagcaagaaataataaaaattggccaggtacagtggctcacgcctgttatcccagcactttgggaggccaaggtgggtggatcacctgaggttgggagttcaagaccagcctggccaacatggtgaaaccccatctctactaaaaatacaaaaattagccaggcgtggtggcaggtacctgtaatcccagctacttggaagaccgaggcaggagaatcgcttgaacctgggaggcggaagttgcagtgagccgagatcacgccactgcacttcagcctgggagacagagcaagactccatctcaaaaaaataaataaataaaaataaaataaaacaaaataaataataaaaattacaataaaaaacagtgaagctgaaaacaggaactccatagagaaaaaccaacaaaaccaaaagctggttccttaaaattcataaatctgtagccaggttaaccaacattaaaaaaaaaaaataaaaaaaaggaagacacaaattactaacatcagaagtgaaagaggagccatcactactaatcctataggcatctaaagggtaataaagaaacattatgagcaactctacgcccagaaatttgataacttagatgaaatggaccaattccttgaaagacacgaaccaccaaaactcacatgaggaggaagagatcacatgaatcggtctttctagtggcctgcccacccccagctccctttctctttcctgactgagacacacagagggccttcaccaccatgtgagccaggcagctgcatacttcccctgtgggcttgagcattccattactgcctgaaacagaaagatcagcatgttgctgtcacatagaaattggcggtgagccaatttccttcaactcccatagaaactccacaatgagacccctccctgtagacatactcaggtcttgctgtggtcacaaggaagctgctgccccctctgtaggcaagttcccctaataaacgcttcaaatgatcactcagggtttagtgcttctctctttggaatcccagccagccccatctcaggcgggtttgtggctatcccttgtgggcacttcctacagtcactttggcgacgaccccagccctgggttcagccagaaaaaaaacaggctgtatctatgaaagaaattaagttgatcactaataacctcccaaaaaggaaagcaccagacctagatggcttcactgatgaattctaccaactacttcagtgagaaatgataccaattctccaaaatctcttccagagaatagaagcaaactattctgtatgacactgtaatgagggaaacatgatattatgaacttatcaaaatccatagaaagacaccacacaaagagtaaactttaatgtaaactatgggctttggttaaaaataatgtgtcagtactggttcatgaactgtaacaaatataccacagtaatgtaagactttagtaacagacaaaactgtgctgtggaaagaatcatatgagagctctatgctgtcttcttagtttttctgtaaaccttaaactctcccgaaaacaaactttattaattaaaaaattatagatctagaggaacatttcaacaacacttctcctgccaaaaagagaacaatcaaaagagctagggaagaggagaggaagacagattaacttaaaagaagcaacagtgagactgacagcttgtttccgagcagaaccaatgggagtcaaaagacagtggaatgataggttcaaagggttgtaggctggtggataggacaggcattgataacctatgattttatacccagcaaaactgttcttcaaaaataaaagtgaattaaatatgttccggaccccaagaaaattagataattcctcagcattaaatctgtatcaaaggaaacaaggggtattttgcagacagaagaaaaacgattgcagatggatgctcagagatacaggttgcaacacaggggaataaaaagggttagaaatgtgtacatataaatgaatatacaaaaacagtatcttttcaaacacgtaagtgtatgaataaagtactttatagcaatagcctacgaatggagcaaaatgtaaacagaagaaaggattttaagacccttggattgtctagaaggaaaagaagtattaattttattagactttgttaagtatataataatagtctatcttataatcaccaacatagccactaaaattacataaaagcacacataacaagataacgatcataaaaaaatttattctacgattaagatgttttcataaaaaacgaataaaaactaaaggcaactattaagatggttaatttcaatgcaaatgtatcattaattacatcagttacaattagattaaatatttcgactaagaaatgatttttacgctgaatataaatacttatatatttatagtatactacatttataatgaaacaatttaacaatgctcaaaatgaaaagtgaaaaagtaaaaggtgccaatgctattaaacactggaagctgacatacccgtattaatatcccagaaaggagatttaaaaatcaaaacaatccgcagagataaagaatgtctcataataacaaaaggcaaaattcaccaggaagataattcacaatttatatgtgcctaataaaacagcatccaaagacatactgcaataattgacaaaattaaaagaagaaatagacaaaactcacaatcataatgggaaatttcaacacaactcttgcaggagctgagaaaaaacatcattaaagaaatgtgaagaataagattaacaaatgatatgtagctatttacaaaacactgcactcaacaattgcagaatacatactattttcaagtgtgtatgggccatttacaaaactgacttccgatggggccatagagcatttcttggtaagttttatgggactggggtcattcagaggatagtctctgagcacagggagataatgctagaaatcaataagaagatacctgaaaatcaccagatgttgggaatttgagaaatttgtttctgaatagcccattggtcaaaataaaaatcacaatggaaattgataaatgacttgagcccaatgataaggaaaatacaacacatcaaaacgtacggtatgcaactaaattgacaaccttaaatgcatatactgtaacacaagaaaggataaatatcaattatctacatatacaactcaaaagttagaataacatcaaattagactcaaagaaagtaacaaattaatgaaataaaatacatatgggaaaaaatcaataaagccaaaagatggttcctccaaatgactaataaaattgataaactcttgatgagacagattacaaagaataagcaaataacaatattgaaaaagacataactagagatcacaaaaatattaaaaacatgacaataaacaactttacacaaatgaattttaaagttttgataaaatgaagttttaaaagttaaaaactaacttttaccacaactgaataaagaaaaaaaaagaaaatctgatgtttcaaagctattaaaataaatcaagcccaaatttaaaatcttgtaaacaagaaacccctaggcccagatgctttcactggtacactccaccaagcggttaaagaagaaatatcaccaaccttataaaacgattacagaaaacaacagaagacaacttgctaatattttctaaggccagaaaagccataacatcacaacctgaaaacgacattctgagaaatgaaaagtaatgacctttctccccaataaatgcagatgcaaaatccctaattaacgtactggcaaaccaaataaagcattacacacagagcataacccataggccatgctcatttattcctggaatgtaagtttggtttaacatttgaaaatcaattaatttaatgcgcattaacaaaatatagaagaaaatcaaatgatcatctcaatatttgcagaaaaggcatttgattaaaattcaacatctattcacgataaaaactatgaaacaaaacaaaagcaaaaccctcttggcaaatgaggaatagggagaactttaatctgaaaaggatttccttactaaagtcgtcagcacgatctttaacagtgaaatgttgaaagcttttcttctgatgatgcaaaacaaacaccagctatcagcatgtctgtccaaagcagcactggctatgctaagccacagataagaagaggcatgaaaggtacgaagatcaagaagacaatgaaagctattattaaatcactcaattatgaacatagaaaagtcaatataatctacaaataaattattaaaataagtagatttagcaatgctgcaggaccaaagttaataatcaaagtccaattagatttctacattattattcaaagcacaaacattattattcaaaacaacaaaacccatgatatgtccacccagaaaacattatgaaacaatttcgagagaaaataagtatgacctaaggccgggcgcggtgactcacgcctgtaatcccagcactttgggaggccgaggcaggcggattacgaggtcaggagatcgagaccatcctggctaacacggcgaaaccccgtctccactaaaaatacaaaaaattagccgggcgtggtggtgggcgcctgtagtcccagctactcgggaggctgaggcaagagaatggcgcgaacccaggaggcagagcttgcagtgagccgagatcatgccattgcactccagcctgggcgacagagcaagactccatctcaaaaaaaaaaaaaaaaaaaagtatgacctaaacacatgttagcatatagtacgtccatggattagaagattcaatattgtgcagatgtcatttaatcaatgcattctcaataaaaactctagcaagtccactggtgagactgacaggttgagctgtaaaatctacgtgaagaggcggatggccaggtagagccagggcagccctgatgcagacaagcagagagggccaccctatcaggtaacgagactctaacattctcaggaattgaaacttgtggttttgccaaaaagagatgaacacaccaacgaaacaatacagattccagaaacagccaatacagacagagccacctcacgtgaaggtgtaaccagcactgtggcacaggcggaaggagcagctttgcagtaaggagtgctgagtccactggatacccacgttgacaagaaaaatgaaaaaaaaaataaggcttcacacagtgcaacaaggctgcgcagggcaacaaggctgcgcagtgccacggtcagtgtgaagaagcaaagccaccaagaagacaggagtgaaaccctggaacaacctggagggtggcgaagctttcttaaacaggacacacacaaatcacaaccacaaagggaggtaaagattgataaattagatttcattcaaattaagaatttctgtttagagtgtgaaaagctgctacagaatgagaggagacatttgaaatacaaatacctaacaaaagatgatataatctcccattctgtagtgttagtcacagtagccaagaaataaagaaattcaaacgcccattcacagaaaattttaaaaattatgacgtgatatacccataagatagaaatgaaataacacagcaacagaaaccaaacacgaaagattacacgctgcatggctccatttcacaacatttttaaatgggcagaactggcgtgtgagaatcgggaaggcagggctttgggggaggtggaggagccggcaggtgaacttgggagccctggtgacaccgtgttcccgaccgtggagctgagacatggatggactgatttcatcatagccctctaagatgtactctcaggacaaagcactttctgtatgtctgttatgctctaataaaaagattaaaaggcagtaatttttttttttaaacggaactccataatttgaagagcttggctgtggttgtaagtcccatttacaaacagctcagggcaaacacactcagatggaaccgtgagcccaactcggactccagaggcctggaggcctaactttctggcagtgggagagcaagggcggtgggagttggtggcaggcgcagggcactctgcatgacacacccagggcagcagaagaggaggagcccagcaagtttctaggcaagagagtgattgatagagggtaatttgaggttgatgtgcgagttatgattacaatgaaatgagagaggggaaaagcttcagatggagctgaagagaagtaaaaatccaaggaacagaaacaagatcatccctagcgcccagacacgagtgccaggagaaaggtctctggaaagggcagatgctggctgtcccctcctacacagtcctgtggacaccgggctcaccacattcagggagcagatggaaatcgagtctttggcccaagctgctccccgtgtaatcctagcctcatttctgcagggcacccctggctggcagagagtgccccagaaacgcggaacccagagctgtgtacaggtgcatgtccgctacgccccgccccgcgctccacggaaggtccacacacagcctgaggaggttcccccagcccacagtgacgcccggggtggaggtcacaaagttttcagagtcatccaaactcattaccttgctaactgggtaaaaagtccagttcaatggatggtgactgaattagagggcgattgtaacagaatgcaattctactattaataatttccgtatagcagctcgaacaaagcactgacaaagtgtcaccaaatgcatttcttgcttcacttctttcatgaacagataaggctaattcacttgcttacgctaattagagcctgttacacgcgggcccctgaacagccttgatgtgcagaggcccctgggtaagccagggcgccagtgacaggtggccggaccccgcaggagtggaacctgcccatctgcgcttgacgaaaatgcctccaaaacaaaccagacgccgccccggcagaggaaactgagaatgaggagaaacggtctcttttcccgatgaaagggttctctgtaatgggcaccaatgaccaggttttgaagggcaatactgtgggtcagcgagggtttccggggccccgtgggaggcgccctgctgtcagacgcgtttctgtcctcctcagcccccaacctgcgcctggtgctctcggccaaccttgctcagagcttgatgataccatgtctctcccttgttcccattccatcctctctgttcttcctcatttttgcctcaagttccacaagtctcattacaaggttatcttatctgaccaataaacccggtttactgttgacaaagctctatttctgctgggcgactggattcggaggagcccccaggagaaaaaacggtccccagccttcagcagcatcctccctccagcagccagctgtgcattctccatgaactgcacctacgcgagctctcctgaaggcagcaggaggctgaacaccaggccgctcagagaggaagcacggggtcctctcccactactcacccctctgcctgcagctgcaccaggcacacagagcacgctcccttccctgccccacagctgtcttggggttaccctcagccagctcctcctctggcttcctgccgtcacaccctccccactggcctccaccacccacgtgtagctgtgggggagggggaaaaggggctgttctgggctccccaccagcaagcctggtttttacaatttcaacctctgataaaaagctctacaacacctattgtaggaaggagtggaatcaattatgatttcccgaggcaattttacttacatttcacactgctctatgacaaattccacttcatttgtgttcgctgtataaatgcattccccagcatccacctgaaccagcaccagccttgttacagcagctgctcacacctgcgctatgacgacgtgggtgccgtgcacatctgggagggcactgggaccatcctgacaggaagccatacccaagccacagtggctgcagacggcccctcaccagggaggaggacgtgaccctcgcaaggtctcgccagcatgcctgacccacgcggatatggggccatgggcctgagacaggccctgtgccgcatggctctattttgagtgcagtttatttgacaggacagggagaaaggagagcagggcaacgtgggaaacagacagcacagtggagtcacggctctggggccactactcagcctgagcagtcagacgggttcctttcctctctaggcctccagcgttcctatcagcaaaacagggaattagatggacttggtcttctacagttcaaaaatcttacagtgctgcaaagtctaggtggctttctccaccgacgggtaacaggcaggcagccagtgcccagggtgccaggcacactccgggccttgtgccaaggagtttccatgcatcagctccctgacccctcattcatgcgggacgcccggccccagtccctgtccagtgcctggaacagaacaggtgctcaggaactgtgtgttcaattaaaaaatgaacgagtgaaaccatcagccaatcagtcctcggaaccacctcctgaggcaggctggagtcctccctttcagatgaggacaaggctccaggggaaggcgcgcgccccaggtctccagcctccgtgaagccgagcctgggctcttggccatcatgctaacgggcaggtgggaaagcgcttgcccagccctgggctctaatagctacctaaagcccccgggcagcagtgaccccacgagtcctgaaaagatttggtgcacatccatggccaggggcaggccattacccaaacagctctgacatcagggtccttcctcaactgaaagctcatctcagctggggagagctggccttgccttcgtctccttcagagctgtgctgggctgagtggggccagaaatcagcatgaggagaattcaaaacaagatgactcgcccatgggaagtacctcccaccaggctcgagggaccctgtgctgcttctggcattttgaattcgcgcccagggctgtgggctcccaccagggtcaggccagctcctagcaagtggtgaggggggtggcgccggcctgctctcccagaactcagcctggagagggaggcagacgtgagcactgtaagaacaggcgaggacaggcagggcactcagggagccccacaccaggaaggaagacccactctgcacacagggagagtgtgcatggggcaggggggcaaggcgcccccgcagaaggacgtggagagggcaccagctgagaagatgcccccagcccactggtatcacgtgtctactgccttcttggggtacagcagcgtgggctgaggacacccagctgacgctgccactgactggccatgataaacagacgcagaactccgagagctcacgctcccagcccagcaccccactcatacactcgccagccaggcaccacgtgccaggccctgtgctggccaggaggtgggcccttcgatcatcccattctcacagagacagcccgggtgctgcaggtgtgagtaacgcaccccgggggcacagaacacctgggtgcggagccccagtttgaaccagcccagatgacccggtcacccctgccctcgcctgcttcactgcactagaactaaaggaaacaagatggatactccatggagcaaggccctgaaaggctgtgggccccgaagcagtggaaggaatgacagagaaagaccagcacgcttcgccacaccaacacctccgtgggtcccaaaacgccacttaaaaacacaaaaggtaaaagacaaactggggaaaacgtgccacaaatacatgaaaaccttttacaaatcaataggaaaatcactaacacggtaatagaaaactgggaaaaatcaacaatcaacagaagaaacgtaactgacaaacacaaaattcattaagacccgttcctcacctggagtggcaagaagtaaaatgctaacactcagcacgagtgaggccatgagggctgcacgctacacctgctgggacagcagtcacgggcgcttctggaaaacgagtcagcaaaactggccaagggtcctgaaggtgttcacacccttccactcagtaacaattgcctaaaaagtaatcagactgcggtggctcacacctgcaatcccagcactgtgagaggccgaggcaggagaatcacctgagaccagcctgggcaacatagtgagaccccatctctacaaaaaaaatttttttttaattagccaggcggggcggcatgcacctatagtcccagctactggggaggctcaggcaggaggatatattgagccctggagttcaagactgcagtgagccaagatggcgccaccacattgcagcctgggcgacagagcaagaccctgtgtctaaacaaataaataaataacaaatgaatcagatatggggaaagcactgagtccaaggatgttgcacacattagcaataatcatgaaaaaattaaaaacaaagctaaatttccaataaagagtctccttttttttttttttggagacggagtctcgctgtcgcccaggctggagtgcaatggtgtgatctaggctcacagcaacctttgtctcccgggttcaagcgattctcctgcctcagcctcctgagtaggtgggactacaggcacacaccaccacgcccagctaattttttgtattttagtagagacggggtttcaccgtgttgcccaggctggtccgaactcctgagctcaggcaatccacccgtctcagcctcccaaagtgctaggattacaggcatgagccaccgcagccggccaagagtttacttttggtatgtctacacgaagaaacatcgtacagccaaaaaagattttattttcaaggaatgcttaatggcacaggcactggctgcaataaaatgtcacaagtgcaggaagcacacaaggctgccagctctgccacagcagtccccacactcggctgcctccatggcacctgcgcacgtgggtgtccgtgagtgcttactggttggctgatagattggctgaatgaatgaacaggggaggaaaggagagaagggagacgtggagatgaaatgcatgccatgttcttggtgctacctctgggtgcaggagtcaaggtctttttcaatggcctctttatactttttgatcagtccccaagctttgcacatgtccagtgtcacagtcaaagagggctgcatgttttaagagtccagtggtcagagcactcacacccatgtactccgcagacccaaacctgaggcccagcagcacagggggccacaagtccacactggggctggccccacagaggcgggagctcagggagggacacaaactccacagggaagccaacaacagatgcctcatttctgaataaagaaatgccagacacgatgtgggagaaaaggaaaccaggcagcccagaggggccacatgaccccacagacaaccccagggacacgcagaccacacacagcccaaggacacgctgagaaatgtaaaccggagtccaggctcccaggcatgagcgcgggagcgctgacaagtcgggacagagctggggtccaggctcccaggcatgagcgcaggagcactgacaagtcgggacagagctggggtccaggctcccaggcatgagcgcgggagcactgacaagtcgggacagagctggggtccaggctcccaggcatgagcgcgggagcactgacaagtcgggacagagctggggtccaggctcccaggcatgagcgcgggagcactgacaagtcgggacagagctggggtccaggctcccaggcatgagcgcgggagcactgacaagtcgggacagagctggggtccaggctcccaggcatgagcgcgggagcactgacaagtcgggacagagctggggtccaggctcccaggcatgagcgcgggagcactgacaagtggggacagagctggggtccaggctcccaggcatgagcgcgggagcactgacaagtcgggacagagctggggtccaggctcccaggcatgagcgcgggagcactgacaagtcgggacagagctggggtccaggctcccaggcatgagcgcgggagcactgacaagtcgggacagagctggggtccaggctcccaggcatgagcgcgggagcactgacaagtcgggacagagctggggtccaggctcccaggcatgagcgcgggagcactgacaagtcgggacagagctggggtccaggctcccaggcatgagcgcgggagcactgacaagtcgggacagagctggggtccaggctcccaggcatgagcgcgggagcactgacaagtcgggacagagctggggtccaggctcccaggcatgagcgcgggagcactgacaagttgggacagagctggggtccaggctcccaggcatgagcgcgggagcactgacaagtggggacagagctggggtccaggctcccaggcatgagcgcgggagcactgacaagtcgggacagagctggggtccaggctcccaggcatgagcgcgggagcactgacaagtcgggacagagctggggtccaggctcccaggcatgagcgcgggagcactgacaagtcgggacagagctggggtccaggctcccaggcatgagcgcaggagcgctgacaagtcaggacaggggaggacgatgcattcctgcgccacctccgtgcggggaaccagagctccagcctgaatcccttagggttggctcagagtcctctctggatgaagtgtctagtctgaggaggacaatccatccggtcgtgagtttggactcttcctacacacaaaggccaatatatcaaaattaaatcccacggaagcccaggttgtcactggagagcattccccaagctccaggcagtggtaaatcagaggcctgaatccactgtgggccctcttttgaacagaagacaaaaggaagagcttacccctaaaggcaacccagcaacccagacgtgtgcctgtcccacctccccaaggccagggctcctgatcagaggtgctgtaaagactcaacagccctggcagtacagggagcccaagcaggtgtcggaaatgacactgggtacctagaatcctaagaactaagctgtctacagatgcagaccaaccaggtgggaggtggtcagctagatcccaccaacgccactcatacccaccaacgcgcacgaggcacgctccgcctcctgaacactcctcccagggctcctccagcactcctcccacagctccccccacagcacgagcttccgcgtgcccacccacgcgcagaagacctccacctgccgcatgctcctcccacagctccccccacagcatgagcttccacgcgcccacgaaggtgtccagccatgcagcaaacgtggatcaggcccaggtacacatcagatctcaccggttccagtgccttctgccacgtggaaatttcggctccttctttgtcttcttaatagactcttcttttttttttttttttttagaacgggtttagatttagaagaatggagaagatggtagagacttttcacatattccacacccaggtgccccactgttaacatcttacacgagcacagtgtgctggccacaataaggagccagcatggacccaggcacgccttgctctcctggactacacagatactgtgcttcttacaaatggaaggcttgtggccgtcctgccttcggcgaggcaccatgttcccaacagcatgtgctccctacacggctctgtcacatctggtaatcctcatggcgtttcagacattgtatcactattatatctgttgtggtctgtaatgggtggtctctgatcttactactgtcattgattctggggcgccacgtcctgactgtacttccgacattgcatcactgttatgtctgttgtggtctgtgatcggcggtctccgatcttactgctgtcattgattctgggacgccacacactatgctcctcagacggcaaaagcttcaccgaccaacgctgcttgtgtctggctgcttcactgaccagccatctccctccctccctctccttgggcctctctattccctgggcgacacaacagtattaaaatcaggccaattaataaccctacaacagcctctaagcattcaagagaaaggaagagtcgcatgtctctcctttaaaccaaaagctagaaaggattaagcttagtgaggaaggcgtgccaaaagcaaagataagccgaaagccaggcctctcgtgccaaacagctcgccaagttgtgaatgcaaagggaaagttcttggaggaaattaaaagtgctgctccactgaacacaccaacgataagaaagtgaaactgtcttattgctgatacggagaagtctgagtggtctggatagatcaaaccagccccaacattcccttaagtcagagcaagttccacgaggctgagagaggtgggaaagctgcagaattcaagtctgaagctagcagaggtgggttcatgaggtttacattaagaggcagtccccatcacataaaagtacaaggtgaagccgcaagtgctgacggagaagctgcagcaagttctccagaagatccagctaagagcaccaatgaaggtggccacactaaacaccagatttgcagtgcacataaaacagccttctgctggaagatgccgtctagggcttttacagttacagaggagaagtcgatccctgccttcaaagtttcagaggacaagctgatgctgttaggagataatgaagctgatgacttttttttttttttttttttttttttttgagacacagtctcactcattctgtcacccaggctggagcacggtggcacaatcttggctcactgcaacctccgccttctgggttcaagcaattctcctgcctcagcctcccaagtagccgggattacaagtgtgtgccaccacgcctcactaattttttgtatttttagtagagacagggtttcaccatgctggccaggatggtctcgaactcctgctgacctcaagtgatccgcccacctcgacctctcaaagtgctgggattccatgcatcagctactgtgcctgatctaagctttttattttgatccaattacagattcacttggagctataaaaaataatacagagatcacaagtagcattcatccagttcctcccaatagcaacatctggcacaactacagcacagtatcacaacccgtatgccgacaatgatacagtcaagatacagcacatttcatcaccacaaaaacccctcgggttgtccgttcacagccacgattcctcctgtgcgtctccgtaactcacggcagccatccacaggctgtctatcacttcagccttttaataacgtcatgcaaatgggatcatgcagcacacgaccttcagggactgggctcttcgctccgctaaactccctggagatctattcaagtatgtttatccacagtgaattccttcttagtcctgagtattactctgtgtgacggaggcactaccgttgtttaaccatcaccaccgaaggacatcagaattctttccagtttttggccattatgcaaaagctgctaggaagagtcctctgtcgggttttgtccgaacctcggttttatttcactggaatcgacacccaggaatgcgactgctggtcatatgggagctgcagtgcagtttttaagaaaccctcgagctggttccagggtggctgcaccctgtcactctcccatcagcaaggcaccagagatggagtttctctacacactgactggcatctgatggtgtccgtttctgaactttgacaggtgtgcagtgacacctcactgtggttttaacttgcatttccctcatgactaatgatgttgaacatctttccacgggcttaactgtcatctgtatatgttatttggtaaaaaggtctgtctatatcttttgcttgtttgctaattaggtgtgtctgttttgtttttctattactgagttttgagagttttctcatctattacagataacaaatcgtctttgtcagatatgaagcttgcaaatagttcctctttatctctaccttgtcttttcatctcttcacaggaactttcacggggcaaaaattttaatcttgatggagtccaacttcagttgacccaagcagaaggaacgaaataataaatattagagcaaaaataagtgaaataaagaacacaaaaacaataaaagaaatcggtcaagcctaaagttggttctgtgagaatagcaacagaattgacagaaacttttagctgggccaaccaaggaaacaagaaagagggtgcagatcactgcagttgggagtgaaagagacactagctgaccttccagagataaaggctgtaaaggaatactacgaacagctgcatgccgaaaattaataacggaggtgaaatgaacaaactcctgaaaagacaaaagctaccaaaactgactcaagagaaacacagacaacctgagtagacccacagaacagcaaagacactggattagttttgaagacgctgcctgctgcctctgcggctccatctcagctcctccggaccctcccagatccccacaactggaatgctggatcttgtgttgtggccccaccggcaccggggactttgttccttttattccatcgtattcccaggtctcatcggtgtcgggaactttgctcattttattccatcgtattctctctgctgttcagaatgggcagatgggcagttcctatcggtccatctctgagttcacgaacgcgctcctgtcgcctccattctgctgctgaccttatatccattaagtttttctttccattattgctaggcattaactacattttctgtcttcccagctgctatttacctagtcctttgctggggagcgtcggcattttggggatgtgcttccttagctccaagtctgggatgaaagaggcagacgaggaaacctgggcagctccccgccaggctgttccgaggcccaaggcccctggcctccatcccgcagaggctcactatgctcattccatagataatgtccaggactcttcattatacttaacagaaggatcaaagaaaatgcgtcaactccatcttcctgcaaacagaggtgttggctgctctttggaatcgctcattcagccaatgctgatttaaaccttctacgtgatgtgtgccgtcataggggctgccctgagaagcctggcttcacaatcacgtgtgtctctcactgttggctgctgagaaccacagaagagctctcagcacacaagggctccatcctaccccctgcactgagacaccgcccaccacagcaggacttcctgaagcctgagctacagcacccccagagttcctgtcggaaaaagctcaaggctgtcaggaggatttgcccttggttctaccacacctgacaacaggcccctgccctgcctccccttcctagcacagttacttcagaaaatccgagctgacaactgtgaatccttcctcagtcccttggagacacacatgcccgcacctcctacagctctgggatgtccttctcaaggaccgagagccaaccctttggaacgtaatcatcaggaaaacaggcctgtctcctagtctggggctggggaaggggagcaggagcccatccctgccagccccaacctgccagctcgtagcagagtcagctcatcacattcatgctacccaaccctcttgctgctttctgtaatttttcacttccctgactccatttgggcacctgttccccacactccctttaaaatgcccagtcacatctgcacaaacctgaaaggagctcagctctgtcccctgctgtcagcagcgactgaataaaatctgttttctccactttaacttacatccagctgcatatacctttgacatgggtcacgactgacgcttgacatgagttgaatgaaaccagatgaggaagagctttgaaggcataccatcaggtgtcaggtcactaaccctctctttgcccgagaggagtagaaaactccacaagacagtctcacttccacgctgcaaaaatgtcaactctcaccatggcagcccacaggggggagggatactgaacacaaaactcactcaggtgcctgctttggcctggccacgctgcacccagctccccgcagcacctcctgctctgttccagagaggcgagcagagcctgcatcctacccagccaaggccagagagaactagctccctgggaaagcagcaagggaccatccaagaaagacttagacacacacacgcacacggacatgcacacagacacacagatgcacgtacacacatatgtacacacacatccacacacgcacatgtgcacacacacacgcagacacacatgcacacggacatgcagacatgcacacacatatgtacacacatacacatgcacacacacacgcacatggacacagacacgcacacagacgtgcacacacaagcgcatgcgcacacgtacacagacacacatacgcacatgcacacacacgcgcacatggacacagacacacgcagatgtgcacagacacacaggcacacggacacacgcacagacacacacatgggcacacaggcacaagggcatgcacacggcattcctaactgccaccaccgaccttttcacactccagccaccccagaaccctggcgtttagaatctgcagctaaaatacacccaatgatggtatcaacgttcatttattcattcaacaaatacttggcgatatggtttggatgtctgctccctccaaatctcaggttgaaaaatgtttcccaaaggtggaggtggggcctggtgggaggtgttggattatgagggcggatccctcacgaatggcccagagccatcccgagtgaggagtgttgttggaaagattctggaacctcaagtgtctctcttgctcctgctcttgccatgtgacgtgcctgctccttgccttctgccatgatcagaagcttcctggtacctcagcagaagcagatgccggcgctgtgcttcctgtacagtccgcagaatgacccagcctcagggattcctttatagagacacaagaacggactaatacacctgaggagccttcacgcacacacatgtccacgtccacgtccacgtccacatccacgtccacgtccacatcaaggcagtgctgctgagggccagaggacgctgccacaggccgaccccgtgaagctgaaagtcaccttcgccaagaaggatgggcttctggaaaacacagccctgcacttagaaacttcagaccctactctccacaatctctttatttataaaattgcttatgcgaagatatttccacgcagaatgcattcaattatgcagtgtaagggggggcctgaatggagaacatccaagtcagccacgaagacacttcaggaaatacaagaaaacgaccctgccactgactttcgaatgtgtctgcatccacgcccctgtcccatcggaggggcacagggtaatacatagcactgcgctcccctccttctcctgtggttcccctcctgacagcgcagtgcagtgcggcagacacccctcatcctcggtgtcagggcagcattagcatgtaaatagctggcagacacaaggacgtgaaagcaaggaagagctctttaattaactttaatcctccaaaaatccatgctgcaatctgttctgacaatcccacgctccttaggaggccctcggcacgacctggcacatcctgtgggctggaggtggccggaatgggcgggcttgggaacgtgatgcccgggtaccgtgcctacaaggacgctgggtcatgactgttctctggaggctacgggtgccctgcagagtggaggcacgcggagggcctgggggggctggggatccagactggctgagcgcctgtttcccaccacaaacagccctgcggagtgccagcctttttctcgagagtgggggcagcaccaccccaggcctcctgccaggccccagggagccctgaggcaggggcctctgcccattctctcctcccaacaccccgcactgcccaacatagacataagctgggcccagggctactgaacagggccagggagggccgggcaaagcctgcccctggaacgtggcagacctcaccgtgcaggaacagggtgtgggtggcggccgcgggctcggacgtgactcaagcacagatgggtgcccgtcccgtcaagagagcacacgcaatggacggcggcagcaatgctccagcaaccacagcaaaggcctgatggagagaggaggggagacagcagcatgggaggacgagctgcctagagctggcggccacaatgcgccgcaggaaggggagcagccaacggtctggaataaaaatcatagcgaatgctcacaggacagaggcagctactacaggtcctgatccaagggtcactcttgctcattcctcccaacttgttcagtccgccaacaacactgtgaggacacgctgggacaatctccgctctctccagcaacgaaactgagacacagacgaatgacttcggctgggttccacacagccagcacctgggaccaggatttgaactcacgcacccaggctcctgagaggacgctcctgccacaaagcacctcaggtgtgagaggccaaagagaagctgcccggcgcacgtggaagaaggtggggacgctgtgaacacactgggaacagtgctttagaaacagcagcagtgaatcccagaggagcccgcagcatgtgtgagatgataacacaatttcccaaatggttcagcagggcacagaaccagcacgggggtgcggccgggaggtctgggtcctgagtacacatgaagtccccaggcgatcgaccacacaagcctctccactgctccagcctcggtttctcttcctgtacagcgagggcgactcagcacagcccacgtgtttcccgctcagctttgtgagattcagtgaggatgacaagaactggaactggagtcccagctcagtgagacagaccccaagaaatggaggccatcagtatggcgtagtcccccggggcgtggacaccctctcagctcctgtgccagtggtgtagacaggggagcccaggggaggcaacagcatgaacaaaacccgagccccgggccaggcctgtcacctccccactctgatgagcagcagcaaccattctccgcacttcacagaggaagcagaggctctgacaggggccacacgcccaagccacacggccgcagaggcacgatctgagccagggcgccctgacggcaagccccggcctctgatcacctcccagggtgaagccattcagcaagggagctgctgccaccaggggccagaaaggacatgaaaggctccggcctcccacccggcctccacacccctctctgctccaggccaggagcaccagcccgtgtctcagtggctgtgaatccctgtaagagtcccctgtatccctgtgagagcccccgtatccctgtgagagtcctcgtatccctgtgtccccgtgagataccccacgtccctatgagagtcccccatgtccctgtgagagtctctgtgtccctgtgagagtgactcccagccctcaggctgccgggtgccctctcaggtgcctctcatggccagcccagcactctgcgtgtacatagcactatccctctcgggagcccgcagggtcacaccagcctggcttacacagaaataaattgtgcttctgtaaccagcaatatttctttaactggaggttaataaaaatcaccgttggaggctaaccagtggatctaatttatttagagacttttctgaagctgtggataaagccctttattaaagcttagtacagcacctgacgatgccctggaaaagcgacagtcgcttagtgggatttggaggccgtggagcaaagtgaaaagtctaacaggattccttgaaggaaggagagtggggtgggggaggggagcgggacatgggagccaatttctcacctgaggagcccagcctcagccagacagcacttcagggcccgtcccaggccttccctaagcctcggagcacatggtgagccccaagtagtccttaaatccaaacgttctgccgagggccccccatggagctgagccatcatctttaggagacatggcacacgtcccctgcaccacaggccgccacagccctgctccctgagggcctgcccatgacagaggcggcagtggaggccctgtaagggaaggacttcctggggaagaccagctgagtgctgcagtggccacctcggctgcctctagggagtcaaggagggtcccatgtaagccccaggccgagccctgcaatcagtgcctctcctgggatgcgggtggtggcgcaggccccacgccccaggtggactgaagccccgccctccctacagaggggagtcccatccctttccaggcctgcactcacaggcaccctatgtccctgtcctcagctggacggcagcgcaggcaaataagatcgcctttcaatgtgcacagaaatacaagacccctttcagccaccaaaggcccccacaacctcagggccgtccagcgagctaggaaacccatgttgtcctcctcctcccaggcccggcgcccgtgcccacccaaccctcccctccagacaggctccggctggggcactgcccatgaaatgatttcgacacacagaagctcacttaaaacttctagtctacaagaggtgaaaactttggaagggtgaagttcaagaactgtgcaaatcctcttatttttctggagacggaactctgcgtggcgatcatctcctcagctgctaaaccccttccagatcagaagcgacacaaaccccgcctcacccgcctgccctacactaagccgtgaggacgtcttagtgtaggaaaggggtgagcgctgcccgcctgtgcccaaggggccacattcaaccaagggtgggaaaagaggtgagtcctttccagaccatctgtccccactgaagattccgtaagctcctaggtggagggctagaccttgcccagacaggagcctcaggtctaaggaggaggagcagcgctccctgtgcccacacgcacagtgcccggccccctgtcccaggtgctacctctgcaccacacgctgcgcacacaacaccccctgggctgagcgcacccactcacagacgacaaaggaaactggaggatcagtaatgaatggccaccagcgcgcacatccatgccccaatgccagctcccgggttgaactcctgggttgaactgtttactgcgtgccaccctcctgggcaaacagtcttcggctaaggccctcccttcccagattctcaggttctacaagtcagtgtctttcctccgttcaccccagctccccagggctgctgatgagctgacctaaggcaaagcaggcaatgagaactgtggaaagggaccctgagacaccgcttgctctgagccgcagctgcgtaacaagctgcagaaaacccaccggcacgaggaaaccctgggggcctgtctgcagaccgtgccgatgattgcttccgtctggaagaacctcccttcctccccttggtgttttattgggggcagtttagctctttatgggtgaagttaaccaaaagaatattaactccattctacactccctgcatctgactgttttccatttgatgatggatgatgtttaatacctcccagtctgagcacactctgggtctgtaaatacagatcctgctttattgctgtttaataactatcacaatggttggggctggccttgtctgctgggcttaatgttccatgagggtctcgtgggaaaagaagccaaaatgcataaaagaaccagtgttccagaatggtaagcacagatgcacacacatgtgcgcacacagcactcacacatgtgcatgctcagacacatgcacacacagagctcacacagcacagacatgcacactcacatgcatacagagagctgcctctgcagacacatgcacactcacacacgtgcactcacatatgcagagagctgactccacagacacatgcacaatcacacacgtgcactcacgtgcacacagctcaccagtacagatacatgcacactcatgctcaatgcacagttcacacagatgtgcatgcacagctcacaaagcacacgtgcacactcacatgatcacatgtgcacacagaactcacacagcacaacatacatgcgcacacaagtacacacgtatggacacacacatacacagcactcaacacagatatgcacacacgtctcctacacagagctcatgcagcacagacacgcacacagtaatgctcatgtgtgcatgcatgcacactgagcaccgacacgggtgtgttcatgaacacccgggtgcacgcatgtgcacactgacgcacacgcgtgctctcagacaccatgctccagcaccctagtcgggcagcggggtaggtgtagagggactcggagaatgagcagctacctgggctgcgaatcctgcctgttcacccaggcaagttccttcatctcatccaacgacaaattcctgttgcacaaacacgggatttccaaatctgagctcagaattctccaagtgagttttaagtgagatgattagagggatgttaatgaaatgagaagttactctgacgaatgccagcagtgaccgctatacatcgaatgcccactcactgcaggtcccatgccaggtatttaacataggatttgtcaggaaataaatttgatgaatggtaataagcatcaaccacactgcataaggcctggcacagggcaggcaggtgggtcagccaggaaggggctgtcccataggatgttgagtgatggccaaaaagtccccctccgcccctctgtgaagaacctcctccaagacgaatgcagaaaaccgcactcagctgaacggagctgtgatgggagcctcccgagcctggctgagccccctgtgccacacccctccagcttcaggtgctctccccactccacagtgactcacaagccaccactcccacttccccaagccagcgccaggccttctcgaggcgaagagctgtgccgattgtcacacttgcctgtgtccagccactgaccgcgtcaaccatgctgccattttcatcagggtcccatcttatttttaatgtgattttgtgtagcagggtgacttttaggaacacacatcaccttagaatagaactaaccatatgtttgttgagtgagttgatgatgaactacctcacacatatatttgaacattacaatttaaaaatattttcaaagcattccctcatgtaatctgtgaatcggctccccgtgcagatggggtgaggcgtgcatgcttcattcttccagagaggaagcaaaggcaaagagagggaaagggagctggcgccaggcacaagtgagagagtgacagagctcaggttctaacaggttttctgattccagctcctaggcttcctccccctagaagagaggaattccagcagggctggcctcaggcctccacctcccttcccggtgccccgcccagggtcagaccctctccctgcacagtgggggcccccactccatggcctctgctgactcggagccgactcagtaggtggctcatgcccaccatgggtggcaaaaggctcgggggcagctcaccagctcacgggccttctgatggcactcaagaaatttagtttaaacacacacagattttcaaagaggcggtaggaggaaggactcacctagtccgcccaggggcctcctgcagaagcaagatctgtgcctggacctcacagacacctgggtccagcagcatccccatgtcttgctggagggcaggagccacccaaggggcactgggcactgcctggcgtgggtggccagactcgcttcatcagcaccagtgtccaggaggactatcgagcactgtaattcccagggcacctcatccaatgtctgcaggcaccagaccacaggttcacagggcacctcatccaacatctgctggcaccatctgcgggcaccagaccacacgttcacagggcacctcacccaacgtctgcaggcaccagaccacacgttcacagggcacctcacccaacatctgcggacaccagaccacacgttcacaaggaacctcacccaacgtctgcgggcaccagaccacacgttcacagggcacctcacccagcgtctgcggacaccagaccacacgttcacggggcacctcacccagcgtctgcgggcaccagaccacacgttcacggggcacctcacccagcgtctgcgggcaccagaccacacgttcatggggcacctcacccagcgtctgcgggcaccagaccacacgttcacggggcacctcacccagcgtctgcgggcaccagaccacacgttcacggggcacctcacccagcatctgcgggcatcaccgccccttccacctgttgcactcctacgagagctaagccaggtatgaggccagaccagaaaccagagaccaggatggaacctcacgcgcctgctggaagcagggaatcccctagccagtgcctcagacccatgtccacacccacacgggcagacggaagcaccaggctgagggtggtgagccagggggttcctgggccgcctccactctggctggtgtcaggctgtggcttgacctttctggcagctccgttgaagcacccacagaaccatggagaccacaagccaacagtggcctatcaccggcctggagaaagtccagacacttcacaccttctgactgaggccagggacctctcccaggaccatggacacagggacccaggcacccacccagactgtggtgcagggaacttacaaggctcttgggtgtgccgtgacaccaaggacaactgaaggggcagaggctgcggagggagcagcccagtacccccgagggcggctcagtcctcagcaggcccacccacctgtgcctcacaggccaggagcaaacacacctgtgcggaacggccaggtgaggctggctgtcacctttaacatctctgaatgtctccaggaggggcctagagagggttcagacaccaccaccaggatgctgcagctatttttagtagaaagactcaagaggcttccttggcagggaaccatgcctttgagcatgaccatcaattttcacctgcagctaacttcctttcctttcaagatcaaggttattcaaagatttggatttcttcgaaactgagtttaaagagagcatgtttctctaccaaacaggataggggattttaaagcacaaacaaggacaatgtcaggccaaagcctgggtaggcaggacaaggttccgggcctggtccctccagcccttcccagacaccctgcaggccctgcttgtgtccccccgaggctgggctaaagccacctgtgccagctggatgatgcctggcctgggcactggaggagcctccctgggctcctctctaagcctcggtctctctggtataaacctccaaagctgagggggactgggaattccacagcctctctcctagcaggacactccaggtttctcgtccataacccacgtggtgctgtggagccttggcctacaggacagaaggggctcctgggatctggatgaagtggtggcgaggggggcgctgaccttgtccttcaggaagagccacgtggctcagcaggcaagatccaagacgtttcaacgtggtatgttagaaactcacacttaatgcagaaaagcccaggaacgagacattgaaaccgcacatgaagactgggccttccctgcatccgccgggtcaccttgctgtcccccacctcccccacccccccaccagctgccctgcgcctgccgggtcacctcgctgtcccctacctcccccaaccccccaccagctgcgctgtgcctactgggtcaccttgctttccaccccccaccacccccaccagctgccctgcgcccgccaggtcaccttgctgtccaccccccaaccccatcccccaccagctgcctggggcccctgagggctcctcagagccatggacaagctgagcagcaggtgccgtgtcaggctataccacatggggtgccagaaactgatttcactgggaagtcttttgttaggagtactccaagggcaagcgtcctctgggaagcgtgttgggaatggatgtttacaggggcgtcaggcagggaaacagccaggcggaaagacaaccattcatgcagagtcaacacctgtgcaccccctgcattccacgaaggagcccccggcaggccaagacccacgctccgcacacatcagagaggaggggctggcctcagagaagcgagagcaggagcagggtgaccacggacaagggcagaaccctatcgtcctcgccacgcgcacagccacagctccgccacagccagccatggcatgactccatatgccaacaggcttccctggccccttcatgtgagcaacagagcacaggcagcggcgtagtaggagccccaggcctgccgccaccacagttggtaacagcctcaggaagaccacacagacagaatgcccaacagacagcaagcaacagcacccaggagggcgccggacagctcactagggcccaggcacagcaggcagggagggcgccggacagctcactagggcccaggcacagcaggcagggagggggctggacactcactggggcccgggcacggtgcccagggagggcacctgacagctccctggggcctaggtatacagtggaaaccctacttacgtttataagtccttatatcttacaaataaatgggtgtgttcattattggccgcaggtcatacctatcctttttaaacaaatatgcacgtatcagtgtgcaaattccacagtttttataaaggggtacaccatcaaaataaacctggagcaaacagctgggacacagctacggcagctggcatgggcatggccctggcgccacagactgctgcccggaacagacagaggaaccgggagggagctggggccccagcctggagcatgggggagggaggcgctggacctccggggccatggggagataggaagccatgtgtccccagcaggacatgtgggaggaggaaatccagaagggagagctgccccaagtcccgggacagcggaggctcctccaccagcctgaggagggaacgggtgggtgccgcctccagtgcctgcatctgaaggccgagccgtccctgccctggcacctgctcccagccactgcctaccctcctgctctgccactgacagctacacgtcttgcgactttggttgttgggaaagttgaaagcaagtaacaccctcttccacattgctgacattagctcaggcatcagaagcagaagcctcgggatctgctacctggtagcaggcccttcctgaaaaccggtgagtttgggggccgcggaggcccatgcagacggtgaggctgggaccaagagtcctccgggcgggggcagagcacagggcaggtgaggcagaggcaggagagctgctccctggccactccaaaggcctcagcacctcctgtaggtgaaggagtccaatattcaccaggcatttactcagagcctgctgtatgcaaggaactgtgccagccgccggtgaacaagggagaaaagggcctgcctcaatgctatgagccggacgccggggatgatctgggttccgggaagtagagaagctgtgtgaaggccccaaggccctggcgggcggcaggaaagcaacggggaagcagaggaggctgcagaggtggggcccatcttccccgcacagcacgttccagccagggcctggggacacgggttatgggggtgccccaggccaacagggtacagggccagggacagcccctgggtgaagccagggagcctgtgacccaggccctgcattctgggctgcaggtttcagtaggctcctgtgaccgagctctccaagtgtgatttgccaccattaagtggacgcaggccatgactcctcaaaaaagaaagtagacctggcttccacagtgctccaggggcacccgattctagccaccctcaacacggagacccgaggagacagccttatctcagcagcaccatccagaaatgccctcatcggggtttctgatgacacacctgccaccagcacccttctgcagagggaggcagggcgggaggggtcagggctgcacccgggtgcccgcagacagggcactcccaccagggccagagcccacgagcactgctgctcccagcccacctcccccaacacagtgctgtggccatctcctcaaatctccctgaaagggccaggagttccacagcctcacctggaactgtccagaaagtcccacccatgggcgggtggggacaggactgtggtcttttcaaagagccaagagtaaagatgggtgacctgaatccagtgtaacgcagcctccaaactccacgcacctgaggcagagacggcggtcgggcgcacgtggagggctcgggctggtggaggcggtccacgctcccacaacccaaccttcatcatcttcacactggagacgggtaaaatgcattgttttgatttcaccgtatttcctaaaattgcttttctccctggaatttttttctgccacagccaggtccagctccctctcggagggagagtgcagcagtgtctgtgacaaggttggctttctaataactgtgcaaatggctttgtcccataacaaagtggacattctttcctgaatggatgtaatagaaatgtcagtctagaaaggtaatgggaaagggcgatatattaacacctggaaattaaattccaaagccgagagaaccctgcttatctgtggagggaagaggccctctcactgagcagagcaaacacgaccctggaagccgggctggccagcgtctcagggcccctcctgcaggctttgcaccgatccaggtgtacgtggagggatgtgctttaagtatgaacaaagcaaggtctgaagctgaacttgagctgcgctcggctgggccgtgccctcgcagtgatgggagagcggggaacacatgcggtactcagggctgctccttggacatccccagaggctaaagcccaggagacaagatgggttgcatgggtcacagtagcaggaggagccgagcggtggggccgggactcagggacgacggcagggcccgaactccatctgtcctgtgttcacgtacacagtgcagagcttgtcacaaagggcgggggcagcagagacagaggaagcggggccaagcctccctccaggcactaggcaggcagcacagcgaggcggtgcgtgccacgacagcaccaggcagaggcacgccacaaaccctgacagaaagcagggagtgaatgagcacacgccaggacgtgtgtcctctcggaggcagacagtgaggacagcaggtaggcagtggtcttcagagggagctgggggtgagccaggcctagggccagtcagcagcatccacatcagctgtgtgacccggcccctgtggcccgcatcgtagggcacgatccaggcctctgccacccctgacagaactggcccggagcagcacaggagcgccaccagggaaccggtgagacatggggaccgcaggctgcaccccagagctaccaagtcacactcagatttccacgatctctacaaaaacacaaaagaattagatgggcacggtggtggcacctgaagtcccagctactcgggaggctgaggcaggagaatcaccggagcctgcgatgtcgaggctgcagtgagccgagaccacactactgtactccagcctgggtgacacagagagaccctgtctcaaaaaaaaaaaaaaaaaaaaaatctaggaccaggcacagtggctcacagctgtaatcccagcactttgggaggctgaggtgggtggatcacttgaggtcaggagttcgagaccagcctgaccaatatggcaaaaccccgtctctactacaaatacataaattagctggacatggtggcaggcgcctgtaatcccagctactcgggaggctgaggctggagaatcgcttgaacccaggaggcagaggttgcagtgagctgagatcatgccactgcactccagcctgagtgacagggcaagactccatctcaaaaataaataaataaataaataaaaaacacaaatctagcatcaaggctggccgcatggcctgggcagtctctatgccactcttaagcctcgacttgctgggctaaaacggggccacagagctgaccccccgacgcctcagcgggcgccacagggaacatgatgactgtctgacacaaacccctggagggtcacagaggatgatgctttccagatgacacagcaggtactgggtgttataaatactcccttcagtgctacctaagaccaaaaattttcagtattaaaaaagaaagagcaagagaaatcgtgccgatcatgaagcctcagacctaaagaggggtgtggagcagaagagacggcgatcagaagcagcatggggctcgcgcaggctcttctgtgggagggatggaggccctctgctctgctctgctctgctctgctctagggaaagagggctagatctcacaccctcaggggagggaggagcacacagccagatttaggctcccactggggcagaggaagaaaccacagaatggctatccaggaaagacgtggaaggaagtacaagactggctccacgacccatctgcaaagcgacccaggagatacccacgtgagcgagggcggtgctcacctcgaaccaaggcccaccacagagctcccacgggctcccacccagcgcccattatcacagaggggtgaaggacaagtcctactcaacactagaaccaggacaaggagttggtgtggctccaagaggcagcccagggggactgttgtggggccacagaaacctacacaagcggccgatcgcggagaggaacacaggctgtgctaacgccaaagcccctggtcttcccactgcaccacgaccacctacggcattgccacggggaagccggggagacgtggcacctcgccccacaaccttcccaagtacccgtgcagctatcattaccacaaaccaagccccaccacggtctagcacggcagatggacacagctctccccgcagtgaccttctgggctcagcaagggcgcctgttcaccggcttcccacaccctccctgacacacgagccctaaagcgcctccctttcttcacagcagccatcaccgcctcaacgcgactgacacctgccccagccccacctagagaggggcccttgagctccgagtctgctgtgcagctccctgctgttttccacagcacctaaatgtgccaggctcacaggagacgcacagtaagaatctggggaatgaccgagcgcggtgcctcatgcctgtaatcccagcacgtcgggaagccaaggtgggcagatcacttgacgtgagaagttcctggccaacgtggcaaaatccatccctactaaaaatacaaagaattcaccgggcatggtggtgtgcacctgtagtcccagctactcagaggctgaggggagaactgcttgaacccgggaggcagaggttgcagtgagccaagattgcaccactgcactccagcctggacatcagaacaagactccattccccccaccgcccccccaaaaagaagaagttggggaatgaaacattaatgatcgagtgagtgaactgagtctgggtttctccttctcaatcccttttcagctggccagtccacctgtattatatgctttgtatgcgttaaatcctgctggaaggccagactttctaaatccacagagaatatcagaaaatgttttgaactcaacagtaacaaaaacaacccgcatcaaaatttatggggtaggccttcgtgacaaagactcttagaaaagcacaagttggagaggatttcattaattcagtaaagagtatcacacagaacatctagcacacaccacgcttactgatggattaccaaagcgcccgtcacagcctgaaggagacaaggtgcctactgtcatcattcctccatgacactgcacctggaggaaaggggcatggagagaagcagggccggagagggagtgtggccagaggagaggagaggcgcggggctggagagggagtgtggccagaggagaggagaggagaggcgcggggctggagagggagtgtggccagaggagaggagaggcgcggggctggagagggagtgtggccagaggagaggagaggcgcggggctggagagggagtgtggctagaggagagaagcagggctggagagggagtgtggccagaggagaggagaggcgcggggctggagagggagtgtggccagaggagaggagaggcgcggggctggagagggagtgtggccagaggagaggagaggcgcggggctggagagggagtgtggccagaggagaggagaggcgcggggctggagagggagtgtggccagaggagaggagaggcgcggggctggagagggagtgtggccagaggagaggagaggggcggggctggagagggagtgtggccagaggagaggagaggcgcgaggctggagagggagtgtggccagaggagagaagcagggctggagagggagtgtggccagaggagaggagaggcgcagggctggagagggagtgtggccagaggagagaagcagggctggagagggagtgtggccagaggagaggagaggcgcggggctagagtgggagtgtggccaggggagaggcgcagggctggagagggagtgtggccagaggagaggagaggcttgaggctggagagggagtgtggccaggggagaggagaggcgcagggctggagagggagtgtggctagaggagagaagcagggctggagagggagtgtggccagagaagaggagaggcgcggggctggagtgggagtgtggccagaggagagaagcagggctggagagggagtgtggccagaggagaggagaggcgcggggctagagtgggagtgtggccaggggagaggcgcagggctggagagggagtgtggccagaggagaggagaggcgcggggctagagtgggagtgtggccaggggagaggcgcagggctggagagggagtgtggccagaggagagaagcagggctggagagggagtgtggccagaggagagaagcagggctggagagggagtgtggccaggagagaagcagggctggagagggagtgtggccagacgagagaagcagggctggagagggagtgtggccagaggagaagagaggcgtggggctggagagggagtgtggccagaggagagaagcagggctggagagggagtgtggccaggagagaagcagggctggagagggagtgtggccaggagagaagcagggctggagagggagtgtggccagaagagagaagcagggctggagtgggagtgtggccagaggagaggagaggcatggggctggagagggagtgtggccagaagagagaagcagggctggagagggaatgtggccagaggagaggcacggggttggagaggcagcgtggccagaggagagaagaggcgtggggctggagagggattgtggccagaggagaggaaaggtgcggggctggaaagggagcatggccaggggagaggagaggcaaggggctggcggggaagcatggccaggggaggggagaggagaggcacggggctggtggggaagcgtggccaggggagaggagaggcgcggggctggagagggagcatggccaggggacaggagaggtgtggggctggcagggaagcgtagccaggggagaagagaggcatggggttggtggggaagcatggccagcatctctcagagagtatgagtgtgcacgtcaaacaccagcatcagagcaaggttgtcatgtgcagggtcaatgtgcaggacccaatggtacatccacaggccaggaacacatacatagaagatcaaagtccaagaagacaacatgaaaactgcgtcgaatgttcaaatacgcagggcagaaagtctaatgacatgtaagaatctaccctaaaatccatcaaacttgctgagagaaattaaaggccatcaaggtaaatggtggaacatgtggcattcatggttcacaagatacgccgatgccgagatacaccgatgccgaggtatcaagatacgctgatgccaagatacgctgatgccgagatacgccgaagccaagatgccgagatgtcgagatacgcagatgccaagatacgccgaagccgagatacgccgatgccgagatacaccgatgccaagatacgcagatgccaagttacgccgatgccgagatacgccgatgccgagatacgccgatgccgagatacgccgatgccgagatacgccgatcccgagatacgccgatcccgagatacgccgatgctgagatacgccaatgccaagatgtcgagatatgctgatgccaagatacaccgatgccgagatgtcaagatacgctgatgctgagatacactgatgctgagatacgccgatgctgagataacgccgatgccgagataacgctgatgtcgagatatgccaatatcgagataatgccgagaccgagataacgctaatgtcgagatacgctaatgccaagataagctaatgctgtgcttcacctggacacagggaaacactggaaggaggaggcaacgacgacagcatggaatcgtaaacaaataaaaaaagagcccatggaacacaccagaaagccctgaagtggacggccacgaggggtccccgggccacggccatggcagcgccacgcgtggggagaaggcggccttgcaatagaggctgccagatcaacagcatgtttcacagaacaaaagcagcaacatataaaaggtaaacaataaagtgtttagaagaaaaccactgagtatcttcacaactttggcaggcaaagactgtttaatcatgactcaaaagcaccagcatcagcaaacgtcggtgagctggctgcatgaacatcaacagagaaattccgagagtgaaaaagcaaaccacaggctacgagaagataactaaatacgtttcaacaaaagactttcacatccagagtaaagaactacaactcagtaagaacaaggcaaacaatcatttaaaggcccaggacggatacagtggctcacgcctgtaatctcaacactttggaaggctgaggcaggcagatcacgaggtcaggagttcgagaccagcctaaccaacatggtgagaccccatctctactaaaaatacaaaacttagctgggcgtgctggcgcgtgcctgtagtcccagctactcatgaggctgaggcaggagaattgcttgaacccgggaggcggaggtggcagtgagccaagattgagccattgcactccagcctgggcaacagagtgagactccgtctcaaaaaataataataaaattaaaataaaataaaataaaaataaaagcccaaaggggtaggaacagaaagcctgtccaggtgcccccaggagtcggtgtctaaccggccagtgagcatgtaaaaagcagctcagcttcaccaagcctcaggaaagtaagaacaacagctttcgagtacaggcccccaccagggagaaaaccaaaggcaggaggtgaggacccggagggaccagcaccatccacaccccaacaggagtgccacctggcacagtaactctggcgggggtggcagccccgggaactgaccctatgccacacctgggcatgcccagcgcaagggcacccaggggatcaccaaacgtcatacacgtgttaaaacgtccacgtcagcaagagtcaacacccccatgctggaaaccatccgatgtcgggtacagccaagtgtattttaaaaagtggtatttttatacaatggaaaacttaacagagtaattaagaaaaatcaacaaatctcagctatacacaacacacatgactctcacaaagataacgtgtaatggaagccagggactaaagagtacaggtatgtgattccaatatgtgacgcttaaaaacagggaagtgggccaggcgcagtggctcacgcctgtaatcccagcactttgggaggccgaggcaggcagatcacctgaggtcaggagttcaggaccagcctggccaacatggtgaaaccccgtctctacaaaaatacaaaaaaattagctgggtatagtgacaggcacctgaaatcccagctcctcgggaggctgaggcgagagaatggcttgaacccaagagacggaggttgcagtgagctgagatcgcgccactgcactccagcctgggtgacagagcgagactccatttcaaaaaacagcaacgacaaaaaaaaaaaaaaaaaaacagggaattgaaggccggacacagtggctcacgcctgtaatcccagcactttgggattgggaggccgaagtagggggatcacgaggtcaggagttcgagaccaacctggccaacatggtgaaaccctgtctttactaaaaatacaaaaattagcccggtgtggtgacgcacacctataatcccagctactcgagaggctgaggcaacagaattgcttgaacctgggaggcggaggctgcagtgagccgagatcacgcgactgcactccagcctgggcaacaaagagagactctgtctcaaacaaaaaaaaaacagggaagtgaagtcaggaggcgcttgccctggagctgagggagcggctggaaccaggcacgagggtcttgctggggttgctaactacctgctcttctagagtctgtcctgggtctgtaatttgtgcacactaaacttcaacacggagactactgagaacaagcctcccgaggtggggctgagccacacccactgtgcagcacccaccgcaggaaggcaaaactggaacacctcacacgtcaggtcactaaaccgtgacccactccctgcacacagcatcacaacagcagcaaaaaggaacacgctgcattcccagggacgaaggtcaaaaggataacgctaagataaaaacaaagagaagccacagaagcgtggctctatgtacagaaaacataaaaatgggaaaagcggagcaatgtttaaagatatacacacaattaaactagaaagaaaaatgagggaagggactgctctacgtttagagcacggctccgtctgacagcggaggctgttctgtttcttacactgggactgagacacgggaacttgctgtattctttgagctgtatgtatatgttctatatgatctttgcacacgcaatgtgtttcacgagaacagtgaaaagaaagactggacgtggggtgggtgggacctcactgcgccaaaatcttgctctctgatccaagagtgggcagagtcctgggcccctgggagtccctggctccgcgtcctcactccaggctgtgccggatcccaggacttaaacagacaccatcagggaagatcagggctttgaaataaaggcaagccagtgacttgaagtggcactcagctggaggaacagcggccttgtctgtggctgggacaggcatgagctacattaaccttgttggggtggtctccaaagtggaagctgcccaagctgtatgaacacaaaataaacaacagcgcttgcctctgctccatgtcccttccacccacacgtcctatgggagcaaaaacatgcatcaggtgtgtctccaccgtgctattccaggagagatgaaaataacctgttcaaaaataaaaacactccagcaacgtgggcccatttctaaatcgctgcgcagcctgggcacggtgccagcgaggccctgccctcttcccgtgggcaccacacccgcctttgtcatggccagggtgcggccaccagaacacactccttcatgatccacgggccactctgaccctgagcacctgtggcctcagctccctcggggcagccagcctccctcgctctgccctcagcacacacaatcctgcagaggagaagagacacagtcagaaggaaatggaggggcctcctcaaaccccaggcctgggagaatcccagcgaggactgcactgccttcctaggatggaccagaagggggcctggagcctctcccgtagcaggccggctccacagatgacactgagcttcagcaaggaacacgcatgtcctgttctgggcctggcctcgcggctaaccctgccgagacactgaatccaaggaggctggggatgcagcccagcaaccccctggcgagggagcacacaggagcccagcctcaggcagccgagtgaatacacaggacacgaagagcaacatgtcttcaaaacaatcaacaccaatatccaggcgggccctccaccagaaagggcatgggagactccagcacagcatcctgggcacagaaacgacccccaagaagagaggaggccctggcagagtcaactgagaacgcgcaggggtccctgagctaagcctggctcccctgccccagattccctcgggaaggcaccatagcatggagaggaggcctcaggaagcggctctggcccctgtaagaggctgggatggctcaggctcacaagagctgcctctgggccaggaacatagcaggaagagagcagcttctccgaagaggacagaggcttctccccggaggacagaggattctcctaggaggacagtggcttctcccgggaatgtggcagcttctcccaggaggacagaggcttctcctgggaggacagaggcttctcctaggaggacagtggcttctcccaggaatatggcagcttctcccaggaggacagcggcttctcccagaggataccagattctcctgggaggatgaggatggcagcttctcctaggaatatggcggcttctcccaggacggaggcttctcccaggacagcggcttctcccaggacagcggcttctcctaggaggacagtgtcttctcccaaaggatggcggcttctccagggaggacggtggctgctcatgggaggacagaggcttcttccaggaggacagcaggttgtcaagggaggacagaggcttctcccgggaggatggtggcttcttccaggaggacagtggctgatcataggaggacagcggctgctcatgggagagcagaggcttctttcaggaggacagcagattctcaagggaggacagaggcttcttctaggactctcttctggatgtgaggcaggaagaacatggaactcttctgaggggtccccccttgtacttcctgcattctgccccctatttaactgtttcttaaacagcagcagcccccgccttcttgggcccagtctccatctgccttcagctgtctcctggatggatctggcctaaactgcacccagcgaatacagacaccagctctccacactctcccatcactgagggtggcagccgtgtccagggtcccagccctcctgttaaagctcatccgctcccaatcccacagcaggcccagccacgttggttttgagaccgtggatcatcaggaatgtttgtggacggttttttgattgacaaaaggaactttatggcagtgggcagatctgatgccccaggcagcgaggacgtgggagaggggaatgtgtgtcgtcaccaaccccagcttcggaggaggtggccgaggaacgtgctcattcagccagcccagacccaacaccccagcccagagctcgaaactcagaccctcaacaactccagaagacacaaatctgtctttcccagtgtgcgggttcccagggcagggtgtcaccatgacaaccacagtctgtgctcagcagccacgacgtgagtccgacgccgctggacacccagcgtcaactgctccccccaagcctggggcctccagtaactgatctgctgtgagacagggcgggagggtggagtgcagacaacaaggggtgggaagcggaggcttttctgtcatttgaaaagtttcttgctaaaagttagcttgtatcactgatattccagaaacaagactctgcagccatactgcggaagcttggggcactggagaaacggctcatttcaaacaggaaaatggtttgtgttcacccagttccagaagccaattttcaactgcttaaaatagtcatgatattttaccaaggtaattatactcttagctatcagtaacaattaaatccttagactagagccgtttaataaaggtctcgaaataaaaccacacactccaagcaccgtgtactaaaatgtcaagcacacaaggagagcctccaatgggaagcagaggcccagagcccccaccagccggaggctcgcagccctcctgggtgcgccttgagagaaggcgctcctcgaccaccccagctgggcgggctgccatgcagagctgaggtgggcactggccgacaccaaggcacacagacccagagcagcaggcacgccgctccctccagatggctgagtgaacagcttcatcacggctggctggacggatcctgcatccctggcctggggctacacgggcgactgggatcaatccttcgtcaggataaacaaccagtccatgcccggcgatcaatacccaccttcttgctaacacagagcaggcccgcgagcacagcagggtcggggtgaggctggcgcgggccagaaagtgccagaggctctccacctgcaaagcagagcagagaagaacagaaacttcctgccctgagcgggccggggtggccatcaaagagcaacggcaggaaggaagccgggcacagacttcccagaaggctgcggggctccactagaccatgagggagccccacagggatgaaaaccacaccagacatccagtgactgcatgtaactcctcatcacggccgggagccctggcactaagagggtgtgggcagcagcaccagtgtcgcgtgggtcacaggctgcaggccagacccagcacacaagaacactcaggcccacacgtgacctgtcaagggaactctgcccatcagcttccaaccgctggcctcacttaagaaaccaggaggttcccaagggatgagcctcagctgaggccgggcggggctgccctcctgtgggggccacacttgtagcccaggccaagacccaggccacgcatggaggaccaacccaaagtgctgcccgcctggccggtgtgggccgatgtcactccccagccccgacccagaatcggggactgggcccaacaacaaggtgcactcaagggggtgccacccgaacacagcacgttcgcaggcacccggggtcatcaggccacgttcgcaggcacccggggtcatcaggccatgttcgcaggcacccggggtcatcaggccacgttcgcaggcacccggggtcatcaggccacgttcgcaggcacccggggtcatcaggcctgagcccaaagtttagcagaaaggagaactgagacccagagagaatgagggacatctgagatcccagagaaaggcccagctcccagcccagccctcccactcttcctcccccaggaagctctgagcttccagcatcacgggaccacagcacgtcatcacgcacccaaagatcaccgagctaaggtgtcccgccactctgaaagaacacagtgtcgccccctctgcttcccgggcctctcctcggcggcagggtcgggctgcacttgcctgaacccccgcagtggtcagcccaaacccccgcagtggtcagcccgaaccaccgcagtggtcagcccgcgtgctgtggcctgtgggcccaagccgctgtctcctcccgctccaggcctcgaggtgactgcagcagcgctttgtgatgacctgccttctctccctccgccgtggttctccacacacactttcgcaaaggggaaattcttgggtccccacaggaatgccacctcctgagaaaagcccttctgcggcaccaccacggcgtccacctctgttgaggtgcgtggcaggtgctggtctggtgccactgcctggccccgctagaagagcgaatcctccaagggctgtgcccacacatccacgccacgtgcacctcacgcatcttgcttagaagctcacacactagcagacacggtgtggaagagaagggaacacagaggaaggtcgagagcttgctccacagaaacgtaccgtgcctgaccatgcagcagggctgggtgtcccctctgccagaggcagcagacagctccggctgaaaagccatgtgagaacattttggagtgtcccctgtctggggtgcacctgcaaagccagggctttggggtcagcatctgagctatgcgcaggggccagctcagcctgtgttccgggtgcccacacagtcagtgcccgagggacctaggcccatgtgaacttttcctttaggagacagcatggagccgcccagagcgagctggagaagctgtaaaacagcatctttggaacggaaatgttactcattttctaaaagctccacaaccaagaggtcccagcagcaaagaggcttggttttcatcaaaaacgatcaagaacaggtaaacatccatgaggcacaactcccagtacttgacaggtgcagcatgcatcctgggccagggtggcacagccctccgcccactcagcactagctggaggcaggcagggggagtctccgcccagcaaactggacacccgccctggcccagagagcatctggggacagattgacttctttcccgccttgtcttctgaaatttcagtgcccaaggaacattttaaacagaactcacaaaaaccgtctttcatgctccagcgacctctgctcacggtgccaggcatcagaacccccgcaggcactgaggcttagagtcgggccatggagccacccacaggtggggcacacctggaagcaggtgacagccttcatcccaagcccaggccaagacccacacagtgtaaatggcatcactggatgggaaagcatgagggtgctgactgcaaggcacgtgggagcctgcagggggtccgcagtgacagggaaccctctccagagctcagcaccaggccaggggtggacactgagatgctggaggaactgaaaagggtggggcacgcagcaggcccagagagtcccacagggagcaccggggctgagcactctctggcattcccagaaccctcctggcaacccagggccaaagtgccaaccctgacccggctgcagcactcctgcctccacagtgagatccagctaaccaggtgtgcactgacccgcagctccctgcgactctgatcaagatgtaagggcatacatcaccttggtgagcagcaggacccgtttctggagcctccgggccagcgcctcgtgggtctcgcgcttcttcctctcctccaacagctggccgctgacctgccggagctcctcctgcagctgctgcctggccttctccagcccccgggcgctgcatgggagagacaagagggcaaagcaatgaagcctggggtgaccaccccaccaagccccgccccaccccaggaacgagcccaccaggacatcctaaaatagagctgcacgtgcaaccccctcactgccatttccgcactgctgaatagctacttaaggcctttcaggagtttctggatttcaaatagactcccagggtgatcccagaacacggcagggagggggaagggagctcaactccacacacaatgggaaaaattgtcggcgacgcagcccttcaggagacgggacttctgaatgagcgagattgcagagccagcgcttcccctctgaatcaccgcagatgtgcagcgtggtgcggggaagcaagcgccaggcgcctggttggggggcctgttctaaaaacattctgtgaggttgaaagcccagcctggcgctaagcactgggaacccgagaggcctcctgtgggccgacgccagaggcagggccaactccaggctgcccaagaggcctctccctgtccgccccttcgggtggctgatggttcctttcaattctgcttttgaaacctcccttttccctgcatggtccccacagccactgcctcagtccctgtgctcgttgcctgtcacctacgttaccacaatagcctcccaacggctctcactagacccctctgccactgggcaccaagctgtctcctcagacagcagagaggggctgggtcatgcgatttttaagcctttggtggctcccaaccactcttggtgagcttccgagttcgtggcctggcagtagcgggcctcaggggtttggatcttgcccctctctctctgtccttcaggagctgacttgggaccggacaaatgacagcgtccactgaccctgactgcagaacccacccatgatgcaacggctttctgtgattccgggaaccccaggactccacctcctcacgggaggggctcccaggaagggcacagtgaggcgcagagaggagaggctgtcccagggagagggtgagtcaggactccacctcccacatgggacagccgggcacacaggtgctcccaggaagggacacagccaggagagatgagaggccgcccgagaggaggagagtcaggactccacagtgaggtacgagagctctcccaggaaaggacacagccaggaaagaagagaggccacaccggggagggtgcgagtccgcggagggagggcccatccctactcagacagcccaggcaggcgcagagcggaacggcgctggaacacgggagctgcacacgactctattgagtaccacaaacttctttccaaaggaaatcttaactaaatctcaaggaaataaaacacagcactgggatagagaaaagctaacagggaccacagccctgtgaggcaaccatcagggagagccaggaggctgcttggaaacaggaatgtgggatggggccatgacctccaccctcacgttcacaccttcccagccattgattgcttctgctcggccttagttgcatgacttgaggaaaagtttcatccctggactgacagatggcgctttcttgggcagtggtttggggaagggaaagcttcatcctggggctggtggatggtgctttcttgggcagtggtttggggaagggaaagcttcatcccagggctggtggatggcgctttcttgggaggtggtttggggaagggaaagcttcatcccagggctggtggatggtgctttcttgggcggtggtttggggaagggaaagcttcatcccggggctggggggatggcactttcttgggcggtggtctccactggactcatgtttgagtgaagtgaatacggggtttttaactgtaacttagtagaagtcttgaaataaaggataagttgaaagtgaatgtgaatccaacactcacagaacgtcagaagggacttggtggcggtcctgacccagccaagcatggcgggaaccccaacctggccaccctcagccggccccagcagaagccacacaagcccacagactggggccaatgtactggcgtccaggacgcgggcgtctcatttcagccgcgtgtgatcttgtgaaatatgtaactgatcgtcaacccatctaccagaacacagctcctaaaaccctcgggctttcccgactgaggccttccatgtgccaatgactgacggtggctgcagcccctgggcagctgcaggatggggcgggacaccaggaagatcgaggccggactagaggctcgggacttcagccccacccctaagctggggaaggagaggggctgaaggctgagtggttcaccaatgagcaggggcggagtcaattatgtccgcctgacaaggcctccatcaaaacccaaaggtttctcaccggagcagggagcgctttcactgttcctggagggtggtggcctccatcaaaacccaaaggttttccaccagagctaggagagcttccactcttcccggagggtggcggcctccatcaaaacccaaaggcttctcacgggaactgggagagctcccactgttcctggagggtggggagggcacggacgctctgcacccttcccccacatctcgccctgcgcatccattcatctgcatccttcgcagtaagcttcataataaactggtgaacatacgtttccttgagttctgtgagacactccagcaaatttatcaaacccaaggggaatcccaactgggtggtaggaaccccagtttacagctggccggtcagaagcacacctgcggctcgcgaccagcaccagaaggtggggactgagccctcacccagggtctgacagcacctccaggtagacagtgtcagaacagaactgagtgagactgagctgaacggctggtgtcccaggcagaaccaactgcttgcttggtgggtggggaaacaccccacatctggtcagagtcttctgtgttgactgctgcgacgtgagagcagaggaaaccgttctgagtctttcctatcccatcagccgcctcggaaagccctacactgacactggccccaggtgcagcactggccagcggcccccctgccccctccaggcgctccataaccaaaaacgcaagacaaaataaaaagcaggcacaaagctcatgggaaacacatattatgaggctactttgggacccagttcaattttaaactactcatgggccaatttaatactcaagggctgtaaaatctactcttgaatcactgaattcaggtgggaacgttcacaagtgctttaaatcacggctccgtgtggtcatttaactagaagaacgccaccattccctgtactctgcttcaaagccagaatgtgcaaaggcaagaatgtgacaggtgctgtctttcaggtgacaggcacagcacaggcatctggccagagagaagggtaaggggctgcgctgggaagcaccctcagctcagcacaggatggctgggcagccttgaagggggcccagcaaacccacaccctgcatcctgagtgagggtgcgctcacatctgtgtgggggcacatgtggggctggagtccccccgccacgcagagcagatgtgagtaacgcacacccacaggacagtggctgtcttgcttcagagcccaggctcccggcacttgaggaccagggctcagtgcaatagagccaggggccaagactgggtcccaggaactggatgtggcctgagctgcttccctcaggcccacatcccactctctgcagcctaggccgcctcggtgaggcaggacggcaggcaccgaggcgccccaagcccggccctcggcctgtaacagtggctcagcagaactagcatatccctccgccactgcttaaagggtctttacctactcctagcttttagagtactgagataataatgcaaaaatagcaaagagtaataatgcaaaaactcactctgggatcaaaggggaagtgtggaaacagctaactaggctttgttaaagatctgcaggagtgctgtggcctggccaaggacagagcagttcccgacccctcggacccttgctggcacccagatctctacgatcgtcagtcacctcttggacccaaccccctcctcttgcccctacccttagcataactagagcctgggatctgtactgacttcagatggtctttgtgactgtaggtcaccatctccccgatccgctggctccccgaatacgcctgctcttcctccgccactctcgcctctcgtgtctggctgtcaagcatcgagcagctgaacctgggcttccttacagacccggtctgaggaaatgcagtggctgcaggatgtagcgtgaagcgtgtgttctgcagcaccccagagggtagacagaggcataggggcgtggggctgagcacaggctggaaaagctcatccgccaggttgtgaagcaaacctctccttcctggcagtgaaatccacatcatgaacggagatgggagaagtgaaccagagcaacacacattcccggctgagggacggcgtgggcagcagagagacacccactccaggaccgtccaggtgcaagcactcgggcccgcgtcatcagggccacatccccaaggcctgatggctgacactgaaatcttctgaacaacagaactagactgtaaaaatccaacaccaagacgtgacaaggagacgacactgtggaatgctcgccaagaaccatgtccgggatgtttgccactcacacctgactggcaggcgagtctacccagtctgttcagcacacgggatgtgggtgaggacggccacatgccgttccaggcagcagagatggcagcacggaacaccgcagccagcctgggctcgctgggcctccattctactggggtgggaatctcaagcaaagaagccacgcgtgtggcatgagcagagaatctcacggcgggtgcaggtactgaggtcaccgagagcagaaggaagaccctcaggcgccaaggacgcagtgacttcaggaagcagctcccagcccttgggctgtgggaacacggggcagaggctgacatcattaaaatgtagacactcagagatgggccccatggaacaggaactgaggctgctgagggaggccatgctggtgtctgcatggggaccctggagggcctggacccaggcctctgagaacagggcagcagcccatggagctggcacctctaggcgctacggaatctgcaggctggcaggctgctgggagggggcaaggccagcggctaaagagctgccccacttgcctgcaggctgaccccgggccctctccagcgcccccaggacaggcactccctggcgaagcgcaggtgtgggctgcagccctggcaccgcaaagtagggctcagagaagggagtgtggagctgcgaggcaacaactcagtaaccacaatgggcagaagacaggccatcagcaaaccagcaagcaggtgcctcctgacactggaggggaaaccggaggctgggggggccctcggggaggggtggcgggacagcctgtggtgtcagagacaggcggtgtcagagccggggacgcttccaatgggcagctggcgtgctcattcgtggtcagcccagtgggcccgaggttgggccaaccgggagcaatgggcaaggtcacaagaggacgagcaaaccaggaacggcctctgcacgggacgtggagagcgggctgagccagaggggcaggaaggcaaggagcaggctggcatgtgtccatgaggtgccggcgtctcgagaggaggggaaggtccagcagaggcagccctgtcctgaagacccgaggaagtggcaattaggagccaagccctggaggtgcaggaagggccggcacaaagtggacggccccagagtgcagcctaaaggccccccatctagcgtttcagacaccgccaacaagtggtgctgcccacccaggcgtgcaggtagaggcgctccggcaagatggcctctgcctcccacccctcaggccctgcagggcaccgggacccagcacgctgagccacagcggcaccagcgacggcgggctctcccctgttggggatgttctctctgttcaatcccggcctttcttctgaggtacagaagagaaaactcaaaaaattaagcctctagttccatgcttggactgaactctgaggtcactggcatttccgtgagcctctgggagttcagaatgaagttcttagttcctcaaggagaagccaggcatgtttatcaatcaatggctctctgagccagcctctactcaaagaacaagctctgagcttctgagcatccatctgcgctgtgaccagccactgccggccactttaatgtgatcttcatcagaaactcccggcctaagaataccgactttcaaggaacaacgaaaggacacaatgtatcccaaagtggcaggagacattttaacgaccttcctcaagacactgctgagccagctcttccacgcacgacccattcctcccacacactctttgtctaccttctcccaagtcccagcccactgtgagcacccgccaaggcaagggcaggcatcgcacaaacaggcatcactggactctccccagaaaccatggggctctggagcacaggagcccacggcgtggccaccgcgggagacaggctctgagagaggccaggacaggtggtgctggggtctaaggcgaagcagttgtgtgctcccgggacctgatccgacccttgggatggtatgaggcggctgttcccgccccagtcacaaggctgagtggtgcctggagtgtggatccacagggtatgaagacgcctccacagccacgcccgggcccagggcaaaaccagcacgttttgggcagtgcacagaatgcctgtgtcgtcccaagttcacctgtgaaaacccagatccccaatgtgatggtgaccaaacgggggcccctgagagggcattcggtcctgagggcggagtgctcccaatgggatgcgcaagttgtaagcagcacaaagctcgagtcctctccctctgccctgtgaggacaggggctggtcatctgcaaaccaggaagagagccctcctcagacccggcactgccatcctgcactcctcagctccacagctgtgagaaacggacgtctgttcagatccccgactatggtactttgttaagtgagcccgaacacagacggtctcctaacccataacgcccagacacactgttcacacatgggcatggggtcacaccgaggcttccgggctgatgactgccccaacacagttatgacacagtgagcccacagcacagttagcctgcagcacagtgagcccgagacacaggtatgacacagcgagcacatggcatggtgaccctgagacagggttacgacttggtgagcccgcaacatggtgagcccaagacggttacgacatggtgagctcacggcacagtgagcctgagatggttacgacacgatgagcccgcagcacggtcagcctgagacggttacaacatggtgagcctgtggcacggtgagcccaagacagggttacgacatagtgagcccacagcatggtcagcccgagacagttatggcacagtgagcccgcggcacggtgagcccgcagcatggtgagcccgagacggttatgacacagtgagctcacggcacggtgagcccgagacagagttacgacttggtgagcccgcggcatggtgagcccaagacagagttacgacttggtgagcccgcggcatggtgagcccgagatggttacgacatggtgagctcgcagcacggtgagcctgccagtggcctcaagggttaagatgtaaacacagccgcatgcacggtgatcctcagtgatgacgtctggcatgaaactaggaaaatactaataaaattgtattcgaaccttggcaaaatctctaaaagcacctttattcttagctatctgaggaacatagatcaagacccacccacaagtatgatttttaatcatctcgattttacagatgagtaaattcaagccttgagcgactgagtcatgagcatgaagccaccgtgtcccccaggacaccactgtactgacctccagggtctccagggccatgccttgagcacccccatagggctggggggagacgccccagtcgggccaagcaacagcactgccacacaggtgacacgttccatgtgtctctcaggaagagagcaagtgcacgggcttggctgagccagcggttgggagggctgcgacccagcggggagcagtgaactctaactggtggcctggagcaggtacacgagacaaaaagcagtgccgttctgcaggaggcgcgcgggagcaggagacaaggatccaggaggctagcagggagcagaggacaggctccagccccagtggacagcctgccctgctctgctccggaagcacccacaggttctgaaagaggatatcgctggacagaacaacctcccaaaccacacgtgctcgtcctccagtcacaagaactgtacacagagctgtgttcacaggcgcccgtcggggagcctcgcagcagcctggatctagaggcaaaattttaaatggagcacgaactggtttcagaaatactctcccggaaggccagggttcccagacagggcagaagcaacactgagcatgttcaggcatccacattcgctccttgctaagagggaacaccggggaagggcccccactcaccacagagaggagccgtctctgccatcgaagcccccagctccggcctggagaccggcacgacagacgcaggctccttgtgtatctgaggagccgcctgagaatgggaatcaatagctgcctctgcagagaggcagggaaacaactgccctgggacctacagggttgagagggtcccgcctacctgcaggatcccccacgtcaacccactatccggaggctctgagcgctccatccacctctggccttctccttcctcttggatggaactgaggccaccaggcccctcgctgcgaatgggcaggggaggactggatcagacgcgtgcgtccgtcgtgaagcacgagagcatcaagaggtcccagttcctcccctgccccacgctcacggggcctccgcggctgagccaggagatgctccctgatcaggagctgctggagattcagatcagagtttatgcttctcatctacccaggactgaagaagaaagcagaggaggctggcggccagggcccctccatgtctgaactcggaggccgagcctcctgagcagtttcccactctcgcccgagcagctttcggctgcagggggtgctcctgggtacatgacctcgtttagtctgcaccagaatctgggaggaaagcagcagcgccacccccaccccacatccctgaggaggaaggggctcagaggtggcatgcctcgctgaggacttgggttcaaatctccaccagaatctgggaggacagcggcagcaccggccccagtccccacatccccaaggacaaaggggctcagaagccaccgtgtcccccaggacaccactgtactgacctccagggtctccagggccgtgccttgggcacccccatagggctggggggagatgccccagtcgggccaagcaacagcactgccacacaggtgacacgttccatgtgtctctcagaagagggcaagtgcaggggcttggccgagccagcggttgggagggggtgaatgcctcgctgaagactcgggttcaagtccacgtggccagctcagcccccacaccgtcatgaggttggggccgggcagccgcactcagtggcacaggtgggcacttgcaggtgaaagagaggggcaagccctcctccctggggggcaggttcagactcggaaggggctgggactccgagagggcaggtgccccaggacatcaggctcagcgtggcacgcagctgttgttatttactctatctaatcccaatcttaaatgcctccaagtgtcaatacacatttttctgaaaaaaataaaaatccaaacagcggaaacaaaaccagagaatgagaagaccaaaggctgaaataattaccaatcaaaggaacggccaggggagcaggctctgaagctgcagcctggcctcccggtcacttctccccgactctgcctctgatgaacgctctgttcccaacatctcgtcaactggaatcaccaaattcaatttgcattcccagataaacagaggccacacggcaaatactctcatctgaccttgaaatgtgagaaggaaaattgccctttgcaatttcaattcactcccaaccataatgaataatccagtttagctgatcagctaccaacctgtaatcgcctgggcagggctcctccaaatgctgggtggggagccccggcaagcacggccgcagggagaccataaattcacttccgccccaggctgctggagattaggaaatgagaactgcagagacaagggggcaagtcacctccccaggctctactaaacaaccgccccatgccctccagctctgacttggagaaaaaagagaagccacagaagataatccggtgcctggagtgacgcagagaggcacagcaggtgtcctggacacatctaccgtctcccgaggtcagagagaaggagaccatccgtgcgtccgtcaaccctgtcagcgctggctgcctgctcgcctaatgcacaggacagaagccccaaggggccacatggccaacaggcaggcagcaggcgggtgggccagcctcgaggctgggggctttctctgcactgctgctcagcaaacagcccaccacctatggttgtaaggaaagttttcctggaacaaagccactcccattcattgacatatggcttacggctgctttcctgtgacagagcccgtggctcaaaaagccaaaagtatttaccatacggctctttacagagaaaggttaccaaccaataccctataccactaccctataccacagatatgaggtttagaaacgctagcatgggtaactaaagacatgagttcccacccacctgaggccgggcgactgcatgtcccccacaagagagcaagctcctgccggctccccgcctcggccactgcagatgcacaaattcaaaggcaaaaacagtaataaccaccctctgactaaacccacccacccaccctcatgtgcagagcgcctcccccacgatcacaggcctctggtaggaagcccaggattccggggcccctcatttccaaatgggagcaggactcaaagaacagcgctgggctctgacgccaagtccatccccaggcagctggaaactcccgggtcgcagagcagccctgctgtcggctgcacagggccgtgcattcagatgaggtgcggagccagattttcccaatgaagatgcgtgtggttgggcaaagggaactgccatttcttcaaacacaccctgaacctccctgccagggagggagacgttttcgcctcatttctcggttagggacacaaatgctgggggagagtggcattccaggggacctggctcacaggcggtaccgccgggacgtggcctgcactttgtgacattatatcttggcctcattaaccctcagctgcctctcagcatgcccaaggtccagactctgtgccccctctccctggttccccgttcctgaagggtgagaagatgcctgagcccaggaagagagaggagagagctgctgtgatggtccaggagccaggccaggaaccaaggacaggactggggatgacgcagggtgggaatggcagagccagcgggaagggtgtttggaaacagatatggacagacaagctgggccggggtggggaggtggggaggctctgagccggtggtggaaagcggcctgtgggcagaggagtcacttggggccagggttgccacactgggctccttgccccttcctcatctggatcataggttctagcgaaagtccatcgagttccctcaaactgacgcgtaaaggaacgaaaatcacagcatccacgtatcagtcccactccaccaacacttctccaatttccagaacgccatcgtgcgacccgggaaacctcaggacacatctcagctggaggacaccagcctgtggagggactgtgggtctcagggactgccaaaaatccccgcatcgggccggaacccaccccacacaggaggcggggggcgctccctgcatcactgcagcccaggacaccatcatgcaccccttcactccctcgaccagccagcaggccccaggacttctctcttccgggctctgtcctccacacaggggtccgccgtcactgttccagcccccgtggtcggcggagcacaacggcccaggcccggcggagggggcaggagctaagtgcgagggagaaaagccggagcacaggttagagaggggaaggccgcctggcctagctggtgggaaagcgggagacacacctgccgtcagggtggggaggctgggccttcatgcgagtggccaacagagatcacgggacccctggggagacagcagggcacgcctgacatggccccaaggtcaggagcaataacagcaaggtagcagcttccagggacagaggaaaatctgatcatggagattaggagagaggttggagccaaagatagagactctgaagtctggccacactgaagtgacaagaagagatgtcaaagcacaagaacttatgtaagaaggaaaagcagagaccgaggaataaagaacggagaacaagctcccgggaacacctgcgcaggagatgccagagaaagggaagggaggcaggagggggaggggacggggaccaggaggccatgtgtgagtgtgagggggctgtgcacatcccacaacagctgcacgggaaaccagaaaagccagggaaggagggagggaagggaaggagagcggggaccatggggccgtgtgtgagacagagtgcaggagggagaagggagagagcgggagagacaggagggaaggagccaggcctggggagctcagcaagggagatgggagagacagaaggagagaccagagggaaggagccgggcctgggagctcagcggagctgctgtcggagccgtgacttcagcaccatgtggccagtgaatcagagccgtgaggcatggagctgggctctggccggcgtcgccgggtctggtgtgggagtgcagcactctagagaggcagcaggccaagtggaaggaccaggctgaggagattgagctctgaggatcaaggggctcacataccccgtttaactgaggcttgcatcaaattagacaaatagttaaaagaagaggcaaagcgatctctgtggcgtctctctttggaatcacccgatagcccaattagcagctctgaagctgaggctctagtgcccatgacaattgatggagcccggcgcctgcactcggcccagcctccgcccacgcctgtgcgccgcacgaccactccagctgcttcagcgctacctgggtaatgaagcacattcggcctgtttattttcccattgattttgccatccttgacccaaagcacagaagtcaataccccgttaggtgtggcaccttcatggggcctctgctgtctctcgcgctgcagggagagctcccctgcccgtcaatcaggaacgggtggcacaggcccccagggggaagagccgtccctccctgcgcgtgacgtcctgggtacccagggctgacagcctctaaacgctgtcactcgaccaataaagaaacatctccaaagcattccccgtgctgagtaacaaaactttaaggagaaaatgagattttcggaattattagtttccctttcattcctttctagcaggagctggagagaggaaggcacccattcgcccatcactgagtcacccggcagctcatttatgaacctcgcttcctccgtgccgggcggggggcttggagggctgacacttgacttgagaaatgccagctctaagcagtttatttcctcttgaactttaagaactgacaaagacaggaatgacctttaaaaggcagggttagtgcttgttggaatcactgagcacttcttggcttacacagcacggagaggaggtgcggggtgagtgcccccagtctcgaggcacggcgctcagcactcgggcaggtaaatcagcggagaggcctccaaggtgggtcagtgggtggaggccagcgcagggcgggctgtcgggagactccagacgtaacagactgcaagatgtcccccgtggccaagatggaagaggcaacggcatcggacgctaggaagacctgggagacctgggttgaaacccggcctccgccactgacctgcagcaggctgtgtaccaagaagaccaacatttcctcctcccagttcttcagggaaaagcacgtgggaagaaacagatctgttcctgatactgcaggagcgcccgttcccatctccaggacctcctggttggtcactgtgagtgtctgctgggcccatcctgtgggccggctgcaggatgctcccagtgattccagcgcagtcagaccctggggtggggaggagcttgggcaagaaggcactggggaagcgggcgcagactgggcatggacccccacccagtgaaggtccggttttccacatgcacccaactcggagaagaatgctcacatccgagccgccattccctttctcgctatcagttaaccagcggcttcctctggacacccgaaaggcattccaaggcagcactgctggcagggtgtgcggtggacactccgcaggatctggaagacttgggtcaaaataattcaggaaacacaatggaagtttctgcgtatgtgtagaaaaataaagctctgctgtgctggtgaatactgacttcatttcctcaaagtccaggggggacagaaagggcctgtccacaggtgtggccggacccgccacagagacagccacgggcagcgcgaggccaggaatgccaagggccatgaccttcacttgctgggagcagagcactgcaagggggcagagcatgcgagtggcgctgcccgggcagggtgatgccagagaaggccctgcgcccacgcagacgtgccggggacgagggagcaggtacctgtgctcacggaggtccccaggctctggcaggcctgactgctggagagcagattagaggcaggaaacccagctcagtgcggagtcctagcccagaaaacctacttcctgagccacggtggcggccactgcagccgccagcacaccactcaatgtgtcacctaccgccagcttgatccctgcattggagaacctccctcagaacttgcctcgcacctctggacatctcctggaacgtcctgatgtccggccccagataaccctgggagccaccagagccagactggggcagggaggagaaaaaggaaggagccgtgacaaatacagggccaagcacgggggcaggagggtgctcccaaccctccaggtgaagagcctgcgactctgtagccttgtagagtaagaaactcgccacatgtgggtaaaagagaccttatcattgccgtcatcgtttcctgaacatacatcgtcacgtttatgtgtttcccaccaccccaagccaaggactatcatcatgtcctttacagacgagatggcccagctgagaagacatcagagagcctgctaaagggccagcagtcagtgatgagcaagaattcaacgccggtcttgctcagtcctgacagtgactacactgttcgttactgcagctcacatgctagccacgggtctcagaaccgtaactccacgctcacctcaagcacccactgtgtatcagccaccattccaggcaaagcagacacaatggtgactgtcctcaaagaagctcaaaggtagaaaaggttaacaaaagacaagtgtaacggagcaagtaacggtgcctgctaacaagctccaccctcccacctcaccgtgtggtctgtctccccgccgcacagccacgcagtacacaccccaggagagcagcgcatgtagctgtccctgcctgcagccgccattgcctctcggccacctggttctcccagggcagtggccactctgatatttctgcccacagtgagcacatgaggccacggcagtgtctcaggaatgccctgctttgagttcgggactttgcctattctgggcacttcatattaatgtcatcatacaggtggtggcctttcatactgttgaattgacttggcatcatgtcttcaaggccagtccctgctgcagcatacatcagcctccatctcttatggctcaataactcctcgctgggtggacagccgtgttgtttttagtcacagctgaggggcatttgggttggccccatctcttggctactatgagcaatgctgctatgaacgatgacacgagtgttcgtgcaaacatgttatcaattctcttgggtgcgcacttagaagggaagttgctgggtcatccagtgaccgcctaacctctgaagacccactggacgctcacggcagatgcagcttcacaggaccaccaggtgcgtacgagggcgccgactgcccactcccgccaacttcacaggcccatcaggcatgtatgaaggcctggaggatggtgagacccatcacctccgtgcgcagctccacctacccccaggaatcccaccctgcccgggaggactccacgctgcgggggaggacggcaagacccgtcacctccctccctcctggccagcagccccaaggagctcctaaagacaagcaactgagctcctaaggatgagcccctccctccccacaggcccagtgaggacaagatgcctggtagggaagaagctcagattctccgtcctcctccccaaaatgcatcccatccaaaggaaggtgcagctcaacaactcagcactgggtaacgcatcactgaagcacaggcacgccctcgctcacaccacagccacaaaacctgccaagtccttatggcatggtaattaggggaagtgctgccagtgacctttaattggaggctccagacaggtcagtcagtcagtgccaaggagcacgacagagacagcacagccggctggggacggagccacacacggcctctgcccatgggaaagccgtaaacgctgcaggcagggagacaggccagccacaattgctctttttctttttttttctttttggagacaaagtctcgttcttgtcccccagagctggagtgcaatggcacgctctcggctcactgcaacctccgcctcccaggttcaagcaattctgcctcagcctccagagtagctgggattacagttgcctgccaccacacccagctaattttttttgtattttcagtagagacagggtttcactgtgttggccaggctggtctcgaactcttgacctcagttgatccacctgcctcggcctcccaaattgctgggattacaggcatgagccaccgcgcccagcacaattgctgttatcttctgcgactaaaagcaagggtggcagagaaatcacgtgcaggaagacgggagatgtggccaggaatcctaagagttacaagctgagttcaggaaaaagttttaaaacaagaaaaagcaacatcactttgagaagagcatggaggaggtggtggtcatgcatggagaaactgggcttcaaacctcatggaagctcttctctttaaaaacgtacccacatggctgctggcggcaggggaagagcgctgtgaccaaggggaggcaggagaaactcttagggtgatggaactgaatcatggctgtggtgggggatgctcagtgcaactgtcaagacccacagagccacacacctcaaagtgaattttactaccaataaataatcgggaaatggaccaggcatggtggttcatgcctgtaactccagcacttcgggagggtgaggcggacagatcacttgaggtcaggagttcaagaccagcctgaccaacatggcgaaaccctgtctctactaagaatacaaaaattagccaggcctggtggcgcgcgcctgtaatctcagctactcatgaggctgaggcacgataatcacttgaacccgggaaatggaggttgcagtgagccgagatcgcaccactgcactccagcctgggcaacagtgtgagactccgtcttgaaaataatattattaatactactactaatcaggaaatggagaagcccaaatggaatacaactgttgaaggcagcttctataccacagtctgcacagctccactgacccaggcctggcagggcggacctctcctgcctgtgccgatcgcaaaggaacagtggtacttgggaagagacaggatcctctttgttgtaaaaggaatgatgtcccatggccaggagcagggactggggagctgaaagaaagctagcgccaactgtatgtttagagagatcctgcctgtccacagagaacagcttcatggaacaccgtaggcgccccttagcatccaagacagcacggcgctagcagctgaagggaaaaccacaacagcgtgtggggagaggaaacagaattcaacagccggtgcctctgagaagatccagtgaaactcagcaaagctgccacttcccctctcacagctaactggatccgtttcccagcagatcgaggcttgaggctctaggagagttagagaagaagaagactgggactcggaccacactgacttctcccctttaaaagtctacacacaaagcacccgcacaggctgagtggaaatatgggggcccacgtgcatggccacagaacagtggacgaggtcgggcagcaaagcgaccttggatcacacatcgcgcctcttcacgcctcctcacacccctgcctgaaacctgccgacgggcctgttgccgctggaacacaatccaggcccccatcacaggctgcgccatctggttaccagcacggtggtctcgtgctaccctggttccgtgtcggcgccagccctccaaccttctggcccacactgagccacctattcccaccacagcccccgccccgctccgtcccaccatggcagtctgagctccactgaaccccagagaggctccccgcttgcctccagggaacaccgccccagcctcgagtgccaccatgacagctctggagctgccactgcacgtgcacatccatctccctgggaggccggggagatcaggacggtgtggcacagcctggggcactcccagcactcagcagtggccatgagcgagaggcagcaaggggacgggtggagggagtgccatctgtcacactccatgcagctcttcagcctgaaggaaggacaccgacggagccgggccatctctcaagtacaacctagacgccctcaactccatttcctgggtgccccaaagcacacaccagattctcaccagcagtgaagccaagtccagggtccacagaggagttgtgaaggttcacacagggctggtgctcaccctctgccaccgacccgcacgcctcccacacaagctgccaggcccacggtgggggttgtgcctgcagaaggcctccgagccacgcatgcaggcgcctcacccggtggctgccatgagccaggacaggctattcattctgccccactccactgatggcctgaaggtcaccaagttcaggtcaaagcaggcagggatgggtgtgctttgacagggagagcggctcacacggccgactcgggccctgctgtgcagcttcctcgagaccacgcaaacaggcaaggagaaggcagccacggagacacagctctctgtggccagtcccaggcacagtggaggccacagccaaggtgatatggtttggctgcgtccccgtggaaatcctaactggaattgcatctcccagaattcccacaggctgtgggagggacccagggggaggtaactgaatcatgggggcccgtctttcccatgctattctcgtgatagtgaataagactcacgagatcggatgggtttatccaggctttccacttttgcttcttcctcattttctcttgctaccaccatgtaagaagagccttttgcctcccaccatgattcggagccctccacagccatgtggaaccataagtccaattaaacctttttgtatttccagtttcaggtatgtatcagcagcatgaaaacagactaatacacagggaaagcaaccaagccccaacacctgtccctggggcccaccgcacacgcccacccatcacgtgcatcgtgtttaatcacacttccaatacctgtccccggggcccaccccacacgcccaccccatcacgtgcatcgtgtttaatcacacttccaacacctgtccccggggcccaccccatcacgtgcatcgtgtttaatcacacttccaagtgcacaccttctaaaggaacgggcttccaaaacaaagtgtccaataatcatgctgttctgacatccatctcgaaggccaggcttaattaaggccaggctaacacacacctgccatgagatcagagtgggctgaagggctgctctccccagacctttcgagctgcagaaggagctccggccagggacagggaacaccaaccctagtgatgttggtttgctaccagctatgcaacgaaagctttgagggcaggcggacaaggaagagtgacaggaaacggcaggttcccttgtcaggaatggcatggtcgtgtttaacttcattaggaagaagtcattcaccgccagggactcctcaccaaacacatccaaatggtcggtaaggggcctcaaaggctagtgccgagcaggcaccacccctggggttctaaggtggaggtgagagaagggtaggccagaagacaaagcaggtccactgagtcaccggcgctcggggaggggccaggtccactgccagttgaatctggttctgcggtcgcttgctttggggaactcaggcaagcgtcctgaacacttcaaaacctcccaatgatccttacctcaggggtttttaaagtaaattttgattttgattttggaacgactaggtgtacagaaaagttgtcaggacagtacagtgagttcccaggaacccagcctcccagtgcaagcactggaacggtgtcacgaacggacctgggactctgcctggacagcaccagtgtgtctgtccttcagcgtccttgttccttcccagggttggatcagggtgccattagttgccacacctcctgagtctcctctcatttgtcagcctttccttgtttctcatggacttggcagttctgagcaggactggcccaggcaggccccccgcagggtcaggtgtgtgttgaggctggactggagctacaggtctgtaaagaaccacagacgcagcgtccccatcatcccttggagcccgggcggggccctcatcgctccgggaaggtgctgcccaccaggcccctccaggcaggcaacgttaccttttgggtactccactctttggaaggaggtcacggagcctggcctaccctagggggattaagttccatctcttgagggcagagaactacatccattttatctgcaatccttccggagggaggagctgcatctgccccattgagtcacgccatcatttatttcggtcagcctgattcacccgcgtttatttgacgcgtcgggttataagtcactccacttcattttcttgctgcaagtgtttcgccttcagccacaggaatgctttcctctggctcctgtgtcccatccacacgccccatccttttgggttttctgcatttccttactttctggaactagaagacactccaggctcctcctgtgtatttcctaccccagtcctaaaaccaggtatctttccaaagacgcccaggtcctcctaccgagaacagtgcttggaagccctgctctgggccccggtcagctccctgttgctgggtgtgcctgcctccgggccccgcagcagtacaggtatgtgccagccctgcatacacagacgcatctgcctgcagttccttctgaatctgtctacttgtgttgagccagtcaggagttcatgctgatgtctggctggggtctggcttttctcacttagaaaaatacattcaagatccatctggccggacacggtagctcacgcctatgatcccagcactttgggaggccgaggtgggcggatcacaaggtcaggagatcgagaccatactggctaacagggtgaaaccccgtctctaccaaaaaatacaaaaaattagccgggcttagtggtgggcgcctgtagtcccagctactctggaggctgaggcagaagaatggcgtgaacccaggaggcggagcttgcagtgagcagagatcacgccactgcactacagcctgggcgacagagcgagactccatctcaaaaaaaaaaaaaaagattcatctatgttgttgtatgatcgataccttgtcccattctctcactgaacaggattccattgcacaaatgtactaatttgtttatctgttcctctgttacagggtgttgtggtgcttctggtttttagttaactatgaataaacctgctataaacacgcacattcaggtctctgtgtggacacaattttcaattcccgtggttaagagcccacagacagggccatcaggtcatacgataagaccgtgtttggctttgtaaaaagctgccacgctgcctcaaagtggtggcaccattttgcactcctcccagcagtgcgtgagagttcctgtggctccacgtctccaccagcatttagtgccgtcagtgatcttacagtttttagccattcccacagtgtgtggccatgtctcatggttgtactaatttgcaatcccccaaagacaaatactcctgagcatcctctttttattttttaatttctgagacagggtctctctctgtctcccaggctggagtgcagtggtgtgatcacagctcactgcagcctcaaattcccaggttcaagcaatcctcccacctcagcctcctaaaatgctaggatcacaggtgtgcatgaccacgccccacccaagcatcctccctcacgcatctgccctctggatatcggttgactgtcttttcaaccacgccccgcctaagcatcctccctcacacacctgccctctggatatcggtgactgtgttttcaaccatgccccgcccgagcatcctcccctcacacacctgccctctggatatcagtgactgtcttttcagacattttgcccatctttcaattaggttgcctgttttcctattattgagttttaagaaggccttatatattctggataccagttatttgtcaaatatctgacttgtaaatattttctcccattctgtggtttgtcttttcgtcctcttaacagtatcttccacagagcaagagtctttaacaaggcaaatttatcaaattttttctcttatggatttcctttcagtgttatacctaaaaactcatcgtccaaccccagggcacacagatttgctcctctatcttcctctagcagatcagagggccttcttcatgggtaaccaggtaatgcatataaaagcatttgggccgagtgcagtggctcacacctgtaatcccagtactttgggaggctgaggcgggtggatcacgaggtcaggagttcaagaccagcctggccaatatggtgaaaccccgtctctacaaaaaaaaaaatatatacaaaaattagctggggatggtggcacaaacctgtaaccccagctactcgggagactgaggcggaagaatcgcttaaacccaggaggcagaagttgcagtgagccaagatagcaccactgcactccagcctgggggacacagagagactccgtgtcaaaaaaaaaaaaaaaaaaaaattcagagggagggcagtacatagccaaaaagttatgttttaaaagaatatttaacatggaaaatgttcacaaaagattaaacaaaacaagatgactcagtaaatagtgcatgcagtattttctcctaaaatcccattagaaaaacatgttccatgtatataaaaatgccaggaaggatcctggccaaaacagtcacagcagctttccctgggaagagggacgacgggaaacctttcttctcagctttgctgtctcctccacattctcgagtgttctgaatcaaagtgtgttgcttttgtaatcagactcagaaaggaattcaaataaaatgctgacatccccttcgctctcctcctccttccttccaggtgtgggaacacagctcacagaatgtggggaaagcagatccggcgaacctagaagaggaagtggcccccaagacagctccgtctcatccacccctatgagacacactggcactggctgggcaacgcacgggagagtccacagctgcgctccatcagccagaggagcacggaacgcggaacccaggaacgcagacaaagccactgtggggcacggggcaacagacaaggagaggctccatcagctgaaaagcctcaggtgacgatgtcaggtcggcagtcggaacccccagaagctgctcccgaactcatgacagcaaggcagggagaggacaggaacctcagagccacagcatccacacagagctctcaggccacgcgggcgcagacggtcgtctgtgcagcttgcagggccaaggaaagcagaggccagggaggacagcactggtgagtggggagcccgctgggagcacacgcccagccatgagcaaactcacagcccttgctgagctgctgggaacaggtggcctcaacgccagccacaagggacagccctcccaggaggctgagcagggacccacccatggtcagtgtggaggagtgtgtccctaaagggctcccagtggccagcactccctctggatgcagaatccctctggatgcagaatccacagctctcacatcgggaacgggacacgcactcacccacactctcgacagaggatgcccgagcacccctgtgtgttggaacctgttcacaacactgctgaggaggcgctacccttcaagtgacaagacggatgagaaataagacacaaaaaaccaaagtctataatgtgcttgacgggaaaaagtgacagcaagacagggaacagacagtcatgatgtttcacaggtgggcagggaaggcccacgaggaggtaacagttgtgaaagacaggaaggaaagtcaggaaggctgctgctatccagacagggtgctccagaaagaggactggccagtgcaaaggccctggggcaggagcggggctggcaggtgagaaggccccgggacaggagcgtggatggcaggtgcaaaggccccggggcaggagcacagctcgcaggtgcaaagcagcaagggggaaggactccaaccaacgaaaccacatgacccatctacatagagaccaaacacggcaaaagtgacccagggcgatgggaactgggtgggagttccaggaacaggaagtgggggggcaggagggactcagctgatcacgctgtttcctgaccgggtgatggtgatgccgtgttcatggataatttgtgcagctctctatatacacactacatacactacagtgaaacatgagcaaaatgaagtttttcaaactgagcaatcattaaatagtaaatatatatatatatatctccccatatttttttttgaggcagagtctcgctctgtcgcctaggctggagtgcagtggctccatctcagctcactacaagctccgcctccggggttcacgccattctcctgcctcagcctcccaagtagctgggactacaggcacccgccaccacgcctggctacatttttttgtatttttagtagagccggggtttcaccatgttagccgggatggtctcgatctcttgacctcgtgatccacccgcctcggcctcccaaagtgctgggattacaggcatgagccacggcgcccagcctgcaagaaatattttaaaataaaatgtttttggaaagataaaaaaagaaaagaaaagaaaaagccaagcacacatccctttatccacacacccttaacttcaaatagcagaagagatgcaaagcagcctgagtgggttagcgcggctcccaggctgcaaacggagatgggcagtgctgaagccgcggtcgctgttaaagagaagggcagcgtaaccagaggggagatagtgcgtgctgtggctgttgctaaacagaaaacgcaaggaggcgaggtggacagcagcaatgctgggcagggtggggcgaggcagcacttcctccctgagccgctgtcatcacctgcctactgcgagaggggcacagggacacacaggcgcacaaggctcagccggcggggccaacgcagggaagccgtgaggagaggagggcaaggacaatagggacagctgtgggtgcaggccggacaccccagccgtctctaaggggaagggcagagtgcatccacgcacacttgccggcagccctagggtgggtgggggtgcctgaaggagagaggcgaggtgtctccctcaagggagctttgcttctgtgaaggaaggagagcgcgggtccgcggggagacacagcaggagagacggggtccctcatgagcctcagggtcgttagaatcgggctcccccaggcctgatcaggactcagtcacgtaatgacagctcgcagcccacaaacaggagaaagcaaggccggcggccaaggtggcctctgggtaaggccatcagagcacacgacgccacacaggctgtgctcagaagaaaggtgaattccagatgaggacagggagggtcctgagggaccagcctccaggacacttgccagccacaaggtcgtcctcgtcggacacaagggctcccaggaggaaagggccctgtgatcccagggagaactcacacaaagacccagtcctccggcgcaaagagctgtggtgctgaccctctgcgcctgcacacatctgggggtggcggggctcatgcctgcaatctggctctgggcacacatgagcctggccgaacctcagtgcggactcggctttcactctcaaaagccaggtctcctcctacgctgcttttccacagagctttgaatttgttagctgccttcatgggaccaggggactcttctattttattctgtgtgtgcattgggcagggcggggcgggcactgaaacagctctccaaggggcatctgaattgaagacttcgaggacagcttcccccgctacagcgagaccctacagctcctcggcagaggacaggaggaacgaggccagactcagcctcagagaaccttcctgcatgtgtctcaggcaaactcgtcaactcaggccccttcacgaggcccagccacagacataagggagggggcaggctgcagctgccccacgaccaccaccaccccgcccagcagaggctgggggcacagacccatggtacagcccgacagcagaggacgctggcccaggcgtgggccccaccctcatagccggtgacccccggccagcaggtctgccactgtacctccaggctgccacccacaggcgggcaccctccaggactgccaggaatgacagcgcacccggggaccctgccaggcacagaaagcaagcagtggaccacagttgacatggttatgataaacgcaccacgggtatcccccacaccagctgcaaggcgggagatgtgaaaggggaagggggcagcctccaggctcctggctccaccacaccccatggcacccaggcacaggctcaccctactcggctccaccacgccccaccccacggcgcccaggcacgcgctcacccctcttggctctgccacaccccaccccacggcacccaagcacgcgctcaccccactcaggcctcaacgtccttgtttccgggacacacaagaggagatgaccgctaaggcctcctcagccaagaccaagtggacaggactcaaaaccagcccaaaatccaaagcagcacaatgcaggcagcgaggacgtgggggccagagccgggacacctggggagggggtctcactccgcccaggcctcagacaggcgactgctccaattcatctcagtccacaccactgagaaagcaatggggccgaggaacaatgggtccgagaatgccaaggaacccaagctgggagccaggcagtgaatgagaaagtgcttctcacacctagagaagctatgagggtgagaacccaggcagcaggaggtgcggacacccacagccacagccggccatccacgggcaccaggcctctggaggtgcagaagggcacgcccctggcacaggggatgaggcaagagacacacagcagcagcaggggctgcccggaccagcagggagtggtgctgagtggggaagggagacagtgaggccttgaggctgcagaggcgtctgggacccctgggagcagcgcctgcatcgagactcagcccattctgaggctcatgcctgggcagtgttcctcagcaagggacgagggccgggaaagcagaaggggtgcccctgctgtaggcttctgcactcaggtctcccagaccaacggggagggcacgctcagcagcgcggtgtcgcactggatcaaagtaagacggaactgagaggaagcttcacctccagcgggaggaaggcagcggaatcactcatgcggcggctccatgccacacagctctgtcttctcggggcacagaggacagatcagtgaggacgcccgcgacttcagactctgaagacacacttggaatcaccttgctttggaggactcaaaatgaccttgagtctttgaggccccaggactggggctgactgcacagcgccgtcctctgccaaagccccgtagcaccagagcgccagtcacacaccaggcctctgcgcagaaggcgcatggcaaacaccctccgtccacagatgaggcctgcgcagcacacgccacggggacccaggtgctcagtccagacaggaacaagagacctcgggccctaaaccctgtgacaaccagacacaaagtgggcaagagtccctcccactcaccgcagagatccaaatagccagggtccctctcccctgctgcctggggtcccaccaaccatgccgtacgcagcagcagtcacccaagccatcatgtgtatggtctcttgcctggttaacaagtcaggaaggctacgctaaggacggccccctcaaacaaatgggcagggagcacagcacggcagacacgtccatccagcacagccctggtcacggaggacacggcacatgcaagagccgcctgctgccactgctccaggaggcccaagggagcgcactaccacacccgatagctgcccggcatgagccagaggcaatgaagatctacacaccacagggctcacaccacacgccaggcatcacgcaccaaggcccggcgtccccagaggtgggcccaaggggaaatggaggaacagaaggaaagcccctggagggccaaataaaggggtcagaaaagacgctactcgaactggacctcaaaggctgagctggaatttgctaagccaagagggcaggtgggaattcttatagaggaaacaacaggaaggtgccggaatgtctggggatggagggcaccctggcatggacacggaggcctcctgacacgatgggtggcaagggtgacagaaacacaagtgaccccagtgcacgtggctgaagagggtgagcttcactgaggctcctaagcgcagtggtagcacagcctcccatggtccaggaaggagcatcccccaacgcaccgctaacactggtgaccagactccaccccgaccgccaggtcaacatgcagcagccacagcctgtctcacctggacccacagccccgcctgccctgtgcactccggcgcccggcccactgtggagggtgcaggtcaggtgctcgctctgttcctcaacaggagttgtttcccgcagcccctgccgccttggcttcgttagcattcaacagcaatttattcctctctcgctgccttcttttgtgcagcagagataagtaatgtttctaatctgtgctatctcccagctgcaaatgttcaagcacttttttctttttatttaaaaaaatgaaatctcattttagatttgcaaaagagacagctagcaatctttactgtactaacaacccgccacccagaggccaggcgggagcgtggacggaagtgagcgcatcgggctgggagacagccgaatctcagaagtcagcactgggagattcatttctcttctcttcaaaaaacccattagacgtggttcagaagaggtactcctacccgagacccaggaagcacccgggccgtggcttcctgtgaacagtcctcaggcgtgagctctcaaccctgcagggaggagcccctggtaggccattctggccatgaaactatccccagtgggactggctgccgactgtgaggagtcacctcccaccagcccagccctcgatgccccaggcatgactcagaagaaccagcaccaatgctcttggtgtcatctgggctaacctagcacatggattttcaaacttctcacagctcaagccaaggggctggctgtgagctccttacaggtagaggtcattccttacacttcgcccccagccacacaaagcccaaaaccgtctcagggacatgggcatttaataactacctgttgatggataaggacataggtgagaagcaaatcccaggcaaccattgaggtttgagagacaggtgcacactgctttacgacggccagcgcagtcagctgcaagtactttctgttccagaccagcagggaaaatgaggaggaaaaggtctcaaagcccagcctgtttctgagcagagctaggaatcccagctgactagatctccgcgttctcctttactcttgaaactctatggcagaaagcacggccttttgaccttgagccttctgacagatagtaagaagcatgccacagccaggcgcttctgagcgtgaagcacctgcttcctggagggggtgccacactccagacattacaatgctggtgccttgctctgtggtactgccgctttgcttctgctttaccctacccacctgcccacccggcgcgtctgcctcgtcctggcaggacaagccctgagcgggccctgcaccatctgcaggcctcctgacacctgagagcagagatgctgtccgtgtcctgggccctggctgcaaaccggaaggcgtccttggaaacggccgcactgggccagcacacagcaagcagggagagtgggagccgcgtccacccaagccccaggtcctggccgcaaatcatcacttcatcttggcagctcattctgtttttatcatcagttttaaataattaagctggccctgaagggggttggagggtgggaggggaacagctcgttgcccaaggccaagccccagcgactggaggcgcggctccagcatgactcctgtcgggaggggcgcaggggcctccagtgccccccacctccactctgcagacacgcctgacaacttgacgttggtgttaaagtcgtatcatttctgtaacagtgcagttattaacgaagcctcatttgcacgtgtcaggggaagagaaaaatcacctaattaaccactttccccatcagcaagaggatggggggagtgctgccaatttgttttcaacggcttccttcccaccctcagaaacttgctccccttcaatgggaaaaaactcataatcctttgtcacaagggactggaaaaaccctagtttccactgtgggaacattcatacaccaaagaggatgcgggcttttgtgctatggggtctgccctggggggaagggccacagccactgtgcctggcgcgagactggggctccactcctaaagggtctccattcaggtgggtggcatgagactggggctccactcctaaagggtctccatccaggtgggtggcatgagactggggctccactcctaaagggtctccatccaggtgggtggcatgagactggggctccactcctaaagggtctccatccaggtgggtggcatgagactggggctccactcctaaagggtctccatccaggtgggtggcatgagactggggctccactcctaaagggtctccatccaggtgggtggcaggagactggggctccactcctaaagggtctccatccgggtgcctggcgtgagactggggctccattcctaaagggcctccatccaggaggctgtgcacctggaccctgagagccagtaaagaacaaagacgcttcttccctcaacttaccaaagtgagcagcctctatgctgccacccaccagactaccggctccatgctcaccaaagtgaacagcttctatgctgctcacccactagactgttggctccgtgcacacagggccacagctgtctcagtcaccatcacagcccaagctggcccacgcctgacacatgctggataaacacataccaggcaggagaaggaggagtgcagtccagtgcacacagggggctctgcagctgggaagaccctgactggaggtctgaatctgccatgggtgggagtgggcagatcacacagcctcgctgaccttggaccctcctgtctgactcaggactgagtctccccagcagaagaggctgagagcacaggataaggtgaaaacgcaggctaggtcctggcaccagtcacagggcagactctcaacagatgccaagtcctgccactgcacccaccatcatcaccaacactgccactgtcaccacaaccaccatcaccaccgtcaccgtcaccaccgccaccgtcgccaccgccaccaccaccaccgccactgtcaccatcaccaccatcactatcaccaccaccaccgccactgtcaccatcaccaccgtcaccatcaccgccgtcaccatcaccatcaccaccgccaccatcaccaccgtcactatcaccaccgtcaccatcaccaccaccatcactagcactctcaccatgtcaccatcaccactgtcaccctcaccaccactgctactgtcaccactcaccaccactgctactgtcaccactcaccactgtcaccaataaccaccatcaccaccattctcacgtcaccatcaccaccaccgtcaccatcacaactgtcaccatcactctcaccacatccccatcaccactgtcaccatcggtgacaccacggtctccaccaccctcgcaccatcatcgccactgtcactatctccactgtcaccagcactctcaggaccactctccacaccatcaccaccgtcaccagcactctcaccacgtccccaccatcaccactgtcaccatcagtgacaccacggtcaccgccaccctcgcaccatcatggccgtcaccgtctccaccgtcaccagcactctcaggaccactctccacgccatcctcagcatgagacgcatccttgtcactccagagacaatgcccagagatggcgtcttctcctacccactcctaaagcgggcctctcctcaggtgtataaggcacacggagaaaacaggttcggcagaggtggcactgtcccctctcaggacatcagctccacaactcagaggaggcagcctccgtgatgctgccaacacctgggtcagcgctgggtcaggcctggccacgctgcctgcctgctggagacgcgcgtcctctcccacctcagggcccctgcgcttgctgctgcctctgcctggaacgggctctctcccctgcccctgcaccctacaaaggggcagctccgaccacgcttcagctctcagcccacatggtgtgtccagagggaggccgtccatccggccacgctgagggccgggtcgcagcccaagccatggctgccccgacgggccctgcacacacagtcatacctgcgctcctgcactcagtgaaggcctgggcctgcctgccccgccgctcagtagacggcacatgggacatcgccatgcctagtgatgacgtttctgtttggaagaagtgggtgagcacctgagaggacagagggtgaggcgatacagcagtgcagcagatctcacccgcccccgaggccactgcacagcggcggggctctcgaccaccgtgctctttgttgggcggggcaaccgcagatgggccagcactggggcaaagcccaccaccaggcagccctgggagcccctgcgaaggcctctcaggagccgggcagcacagccagaacactgagactcgatcccacaggggagaaggagggagcggccacgaggaggagccagggaggcggctactcagagggcaggtgctgtcctcctccctgcccagatcccagcagtgtggcataagcagaccccctgaaccactgtgcacggagtccctccgcatccccaggcagagggacagtctcacaggtggtgtccggactctggagatggggtgggaaaaggcaaggaatgcggggagaccaccagttctgatgccacgccatacaacactccaccccgctggacgtcggagaaagaggcccccagacacatggcagagaatcaaatatgcagccggtgtctggaaatcattcaatgaaggtaaggagtgtgctcctcagcagcctgccttgagcaaaagcatctcgtggcagataagtaatgatcagagctctccgggccaactgcacaacaggccatatctgttattaaaggcatgctgctttgatgaccagaaacctggattagaaccacggcaggctgggcctccatttggggaaccaggacaaaggcagagcagatagcggcaaactcctccacagaggcaagcccggagtcccctgtgcactggcggaggctgctcagcccgagtggcactgcacaggctcctgaaggcagatgaggccccggagagaaaacacaggaagacagcccccacagccccgcccctccgcgaaggagagccgtcacggcggcgcaatagcaggccaagggggacgcagtctggcatgtggaggcggcctgttgcgtcagatccctgacccgcatgtcaaacacgctggtgcctacagggggcggctgcggcacctggacactcggaacacgcgctctgccaccagagacaggctgggctcaaatgagaaggaatgaaatgccagcaactacagatcttccacgaaagctccccttaagccagctcttcggtttaaatgaatttactcctcgttaaattcttaacctgaaaacataactgttttatacttacatgcctcattgtgacatccctaacgcctttgaaaacataactgttttatacttacatgcctcattgtgacatccctaacgcctttgccatgaaagacctcactgccaaatcccactttaattatctgagcacaggtcacataaatcactgcagctcccacgccaggccgtgcacagccatgtgggctcagcctgcagctgcctctccttccaacgtgcaatgcagggtaggtccccccgcaagccctggggactctttccggagctcagggaaggaaaccgctcacctcctaaatgttaaaacacgaagggaactacgcacagcccgcctggagatgggattcctggcacagcctgagggctgacccacccagtcagagcccggcttccccaggggccggacaccgcagtgaggggctgttctgaaaagaggtctgccgggaagaaactggctgtgcctctgcagcccgggagagcctcactctctgaggccacaaacaccgcaccgtcctgcttggggatattccagtgagcagaaagggaaggtctctgccgacaaggggttggttactaacaaagggcactaacacacgagctggcttcaggtggtcacagcctgaaaggcaacaaagccagcagcgaggtggagtgagggggcccagctaagagcaggggaggaaggccactcagggcagaacaggccgcagaaaccgcagtgccctacggggcggtctctgctggcctggcagcagcaggcagagcaaagcgtgggctccacgggagggtgggcgggcacagcctgcgctggggcaaggcagggagcgtggatcatcacccgaggcattcataaaggacaacccaaatgtctgctttgtggctgctcctacactgccctgaagccaggaagtaacgaggccaggaagccctgggaccagccatgcagccttgccaaggccagccacgcactgtgaaggttctgagggaaaatggggcctctctcaccacagccctgctttacctggtggcctcggcctgtctcctcacccccgcacggtccagtaagagaccaccttccagatgagaccagaaagtccaggcacgtgagacgcccagccaaaaccccagtaccaccagctccagctctctcctcctcaacgctcctcacccaccccgctccccagctccagggtagggcagcaggaaaggcccccatcgtcacagatgccacctagcaacaccttctggagcacagtcccagagccctatccagctgcggccccacaaccaaagggcaccaacacctcagccctgcccctgcccctgccccacatatggccccgcccctgccccacacatggccccgcccctccattctgcccagcacgaagccccaccccccagacctatctatcacacacagcgccagccatcacacagccccgcccctccaccctgcccagcacacagtcccgcctcccacccccagcacagggcccttgccccattacgcctaggctaggaattgggcccttagtgctggcacatcggcagcacccctccactgcgtcggtgccttgcgtgaaaggtgcgagcacggcaggccgcttctctatcggatccacatgtccatccctggagacggccatggtcactcacactccccacttcccaggcccggccccaccctgcccttccttctctatcggatatacatgcccatccctggagacggccatggtcactcactctccccctttcccaggcccggccccaccctgcccttcccacatgcgctcctggaaacctgtgccaagccagcaggctctccgaggctccctctccaaccctgcctaacaccaaggaggacacgtgagctccactctcccaggggtggggggagaaggcaggccaggggcacaaatccctcctaggagaccgcctccctcctctccagcccaccagacccaggctagcatagcccgtcacactctcggcccatcccgcaaaagacgcctgcagctgcactggaacgtgttgtcccgcatgggctgtagggcctccacgaaacctgagagaggaaagtcaccattcagtcccttctgcagggctgcccctccccagctgtcatgagtccatgctgcagccggctctctcagctgggagccagtcacccttcagcccccaggaggactcgtgatggagaccctcctggccctggctgagagacagctgagtgcagacctgggcaggggcccgggggtccagaacgcagctggcccagtcccctagaggagcgtagtctagtgtgaaagagccaggaggctcctgacgccgtgtgttctcacagggcccggccccacagcctggctcccaaggacaggaagggcacccacatacagcatcactcagcacctggctgcctgggacagccggagggcctgaggatggcagcgcaccgggaggcgtggaaggaggcagggccaacatccctagcaacacagaggagtcgcaagcaccttccctgcaggcggtaagccaggagtgtgtggggcgggacagtcagagttggtgaggtctcgctgccggagcatccggtggcaggaagcccagtccagaggctgcagcccaagccacagcagccctggggcagagggggctggccctcgaggattatgtggtcactgcagggtggtctttgccaccccaccacctccccctgaactacccacagcctcttcgctggacccctgcatcctcacgcaccgacacacttcctgctccccatcccgaaggcctctttctccaggtcgctcttccgactgtgtgaggtaaccatgccactgccgcgcttccagtcttcaacagctgcccgctgcaatcatgctgtgatccccgcactgtgccagccctgctggcgtcccagcagctcgtctgtcccgcttggtcacccctgcccagcccccggctgccctcaggcctctgctcagatgctgcctcctggtaaggccctgcctggcccccagtgacgtctttcccaccctgtcattccacaacacccaaagcatttccttcacagtgctttcaataatttcaacgcacttcctatgtttcaaaacattagagggtatttgagggtcggagatggtaaatgcttggacacagtgatgggtgaaaatggtttctcagctgccacccagacctgcaagggcacccatggggatggtgcctggcacatgtcgctggactgtgtcccgggctgtgacaccatagctctccacagaagagtccaggcaggggacaggagacaccggcacccccccaccccccaccaacaggatgctcagtggggacatgaaacccatccaggtgctcggaaaacacctgttttaaaacttgctgaccaaaaaccccaaaatggatcatttttaaatacaaggagcactaaagattttcattatgtacgataacattcccatcagaagagaacaaacttgggggctgtagcaaatgaattccggtgggattcatgtccgctgatcactattcaggccccacctcattatcatagcaggcttaattggcatttcatccccacattgtgtctcacaaacgaacaaggtgtaattatggtaaaaagagcgctccgacggttttggtttaattcatgtcattcatccgcgtcagaatcagcacagatgttctactggaggacagagaggaagatgagtggctttcaaattatacttttttagtttaaaactttatttaaaataaaaagttatttaagtaaaatttacaacacagtgtttttctccctttgttttacttgctatagggcattaactttcaaaggctggttctgcttaatttgatttttcattttcaaatgaacatctgtgtttaggtctaaaaagctctttgtttaaacatacagagccccagaaagggtctgaacaaagccttcctctgtaaacacttgattaccaggaaggcttttcacagggagccaggggttggcagagggggtttcactctggctttctctctaaggtcagtagaaactttcatctcctttcagaatgggagaaacaaaggcagcagccctggggaaacggctcagcctcgagctccttctgagctagggacgcggcaggagcggctgtcagaaatgggcccaggtggcctccaggagccggcccgatccacgatcagttccatcccttcttcactggcacatctctgaggcagctcctggggaagtgcagggcccccgcgagggctcgcaggaagagcacgggacagaccaaacaggcgctaccaagtatgggttccagacccccacccggccattccagacgcctccctgtgctgcgcacacagcctccccgcacccgctctgcagctcagagctgctcaccctcagctctgggtcctccgcacccacttcggattcccatcagaggacaggccctgcctgtgggcccatcaccatcccatctcccacctagacggaaaacccgagctctgctcctcctgaaatgaggccagccctctggtgtcaattacatgcaacttccccgggcctcggcttcttcttcaggccacatggatagtccctgccttaagcagcccatgagagcactggaggcgcacacacaatcaggtgacgagaagcggctgcagcagccgcagggaacacggcaacacaggagccgaacccggcacagcgggagccccacgcccgccaaccccaggaggacactcaagagtggggccccaaggactctgtcatttcaactcacttcctatgtttgtaaacgtcagaactcatagcagggaggtgtgcggcctcaggatcccagcaacagcccccaacagcctcgagatgctctggcgtgtcagctttagggactacatcagaagacttccccacaatccaagattgtcaagagctggttaacgtaggaagtttagcaagagctcactgcggctgcgtgggtctaaatagttttaaacacttctgtgtttttatagcattatatttagaaacctctaaataaaactcatggcgagtgttgcaataatatacattttttaaactaattgaatgttgccattacaagtgctattttggacaatctgctaaatatgtaatttaggaattaagattcatatcttacaggatacgctaattattcctttgaatccgtttgggtactttctgaacacacacaagaagtctgagagttggcgacaatatccacccttctccacagcgcagaggtcaggccactagtaagggcacaagcgtgggctcagcacagttgtgagagtgcagacccagctgcgcaggccggaggtggccatgaggcccacgcctttccagtccaggaggctccggctcaaagcagcgggaagttcagtttattaaaccacagccgattttcctaaggctcccctccactgatctcacacacgttatcaaaatgacacagatgtccagatggcagcacctcgaagattcttgaagcctcctcctgtgacttcaatgacacagatgtccagatggcagcaccgcaaagattcttgaagcctccttctgtggctggactgtgcgctcacagccgtgccgccatgccccacgcctcggtacacagcaggcacaaccaagcgagcagctgcccggctgctcctgttcccttggcgcctcgaggtcccggctcagaagccacgcccaaagcggaaatcagaccccgcagggctgtgactcgcacagacacctcctctcctgtgaagcatctacttctattaatacagcctgagacagagttcacttcttctgaagtcacaacccaacagtgattcgctctgactcacactggcagtggagaaaactctggagtgactcagacgtgcggcagatgaaggcctccttcccatcctcaacacagccaagtcattttgggtctcaagtgtctcccttttgtcccaaatcaaatttttcttgctgaagagccatcatttcagactattaagatgctttcagatctgtgacgggcttcaccaattaataaaagctacttctataccgatactcaccgcctgcccccagtgcggtccgagcagggaattccatggtgcacgcccataagaagcgctttctgcatctcacaggacaacagccgtctgcgctcagaccccaccatctccctcaaacacagtttcccagcagagccgaggagatgacggcgcgggcaaacccttcctgtccaaacaaagctcactacatccctggcttgctctgctctcaccccatccctccctcgagtcctgtacacaagtgaggggaggaagaacggatcaggaagcagcagggtacaaagagcagaagagagcttcggtctcaagtccacagggcacgctgcggccaagtcctccgacgaaaagtaaattaaagacaagaggaacaaagaagaaacagggagagaggaggagcacacacaccgagcgtccactgtgcccgcccctcgctccccccacaccatgcggtctgtgtgatcgtcccacagatgaagactagaggggctcgggaagccaggcctcagagcccgcaggcgcctccatgcacccctccacctctgcacgctggctgcccagcccccagtcccaggcgtggaagcctcccaggcggcaaggagctttcgagaccgtggctgctcagcccttgctctctgctctagtcaaggagcgtgcctcggaatgaatgaggtacagtctttccctaaagtcaccggagaacagagatcaatgaaaaaggaggaagggaggaaagacaaaagacttgagaggaagcaaaacgaaaccagcttagatttgatcccgatacgtgggaaatcaggtggggaaaaggggctacaactccatgatgaccacaagtccagagggctgtgcaagccaacacggctgggggctgcagaaagcaccacagcaactgtctgacgccaggttggggccagcagccgcacgctggaaaacgcaacacacagcccacacagccctgtgggggcagctaagcccaaaaccctggcgtggcccagcaggagcaggcctgtgcggagtggacctgcacacacagcaaacgcacacaccgcgaacgcacacaccggatgcttcccgctgtggagacccacaaggcaatgtcttctgaagttaaaaggatgccaggatccagcagtcccactcctaagtatgtgctcaaggaaaagtaagagtttagatcatacaaagccaacatttccagcagctttactccatttcaccaaacccagaaacaatacagatgtccttcaaccagtgaacgaataaacaagtcccagagcagccgtgcctggagcatcactcagcaacgaaaagcagcgctgcgattcacacagccacgcggtgagtcccaaatgcacctccatgagccaaagatgccatatttgtatgacgttctggaaaaggcaaaatcaccagacagaaagcatgctggggtggccagggaggggagtctggggtggtggggccgcaagtcagccccaggcatgtgaaaatgcgcagctgcacagcagaagggcaaatgaggctgtatagacagttttttttaatcaaccagaatgaaaaagactcaaaatgaaacaccagctctaagcggtaaacctaagggaaccacaaacaaagaacacaacaccaggcagtgggaaacacaacggcacccacggtgctgagaaaacgccacttccactgggaacggtaggccaaggacagaacggcctgtccacagacactgcaccctcgcaagtcaacctctcctcacagagccatggattagcaattccagaaagaccctgtgcgcacgtgaggactggatgggtaagtaaaacatggtgtgtgctgacacctgggcttctcaagaccaaggagacagcacaggaggcgaggacagcccaggggtgctggatggagccagtgtcagggtgtccaccgaggggccctggggccctgacacacccggagcaggcagcaccccacacccacatctcatctctaagcagcactcggcaacaagaggaaacagggctcactgggaaagtggcggactgcaggaaaagggcaggaaaaacatctaagtttagagcatcctgcagtgccagatagtttgaaaaaaaaaaaaggctttaaaaaaagatgagggcaaatcacagggcacgagagcccaactgtgagagctcccagtgaccaaggctgaaataccgtgaatgaaccgaatccgcagagcactgggtcacggccgtgaagtaaaacagagaaggaagcaactgacacaaataacctactcgacgaggggcagagcctccctcagcaaagcgtcccactcaggaaacggggacgaggggcagagcctccctcagcaaagcgtcccactcaggaaacggggacgaggggcagagcctccctcagcaaagcgtcccactcaggaaacacggaagagacgggcggacagaaaaccgccctggggccatggtgacaagccccgcagctgagatgcaccaatagatgcttgaactaggaggagaagtttttgtaagaaatgggggctgggcacggtggctcacagctgtaatcccagcgctttgggaggctgaggtgggtggatcacctgaggtcaggagttcaagaccagcccgactaacatggcgaaaccccctctctactaaaaatacaaaaattagccaggcgtggtggcaggcgcctgtggtcccagctacttgggaggccgaggcaggagaattgcttgaattcgggaagcagaggttgcagtgagccaagattacaccactgcactccagcctgggcaacagagcgagactctatctcaaaaaaataaaataaaataaataggatatttgcatattctcaaagcatcttccccaagatacttattatcagaacaaaagccgcagccatgcatttagggaggccttcgccaggtgaccggagtgaccacacccgcaacagaacatggtgatgtcgcacaccccgacatcacacacccagagggacatgacatcccttttaagattttctgtccaaaaatgcatagcttcaacctaatcatgtataacatcagactcgctccaactgaggaacatccacaaaacaccagcccgtgctctcgaagaggcggggtcacgacgacaggagagaccgaggagcagattctctcctgtcccagagtgcagggcaggacagggccaccaaacgccatggggatcccaggccagatcctggcacagaaaaaggagctcagtgggagagccggcaagacctgaacgcagtcaggacccgcgcctgctgcacccaggccttacagcttctgataactgtacacgggctcacaagacgttaccctcgggaaagctggcggagggtgcgtcgaaacattctccacgacttctgcaactttcctgtcagtgtaacattatgtcaaaatgaaaagttcccagaagaacatgccagacacatgagaaagacaaaagggcaaatggccggatggtaatgactcatcccaaaggccatctcaacacacctcgggcgggagagccctgagccagcccacggtctgagcagggaaccagggggccttccctacacagagcacagctcccaccctgcagcaccgcccagccggggccaacaccagaggacgccatcctccttaaggccacaaagtgtatggtcctagggcatctttcctgaaagagacaattgcgagaaatgaaagcctggctgccgggatcaatcttgcgggtcacctccctgcagcaaggcccaagccgacgtcacgtggcagaaggatcttcatgaagatgagcatggctacgacttgaacggtggtttcttaacagggtccaacaactacagcctgtggccaaatcccacccacagcctgtttttgtaaacaacttttgtttttttaacaaagttttgatggagcacagccacccagaatcaaatacgaatcgccgctgccgctctcacagcacgatggcagagttcagcgtcttcgacagagaccacctgcccggcaaaccccaaagagtccgttctggcccttcacacaagacacttgtcagacccatcttttgaggcccacaggtagttctgggatctcggtaagaatctgctttgcaaacacaagggcctcgaagccccgccttccggtgagcaccgctgcagcagcagggaaccttccggaagaatctgttcccagggtagaaacagtgacgggccagtgcagcagagaagagcagagcgcctgggagacctgcatcagagcccgaacagctggaggcgccagctcagtctgtatccccgccccgcgacccaaggctcccccagaagccggggcccaccactggcacactgcggaagcactcccgcaggaggacatgaggccacgttcacaccacggggcgctggctcaggacccttcccagcaattcccgcatgttccggggtcagaggaggcgctggacagggtccccacgtgttccagggtcagaggaggcgctggacagggtccccgcgtgttccggggtcagaggaggctggacagggtccccacgtgttccggggtcagaggaggcactggacagggtccccgcgtgttccggggtcagaggaggcggtggacagggtccccacgtgttctggggtcagaggaggtgctggacagggtccccgcgtgttccggggtcagaggaggctggacagggtccccacgtgttccggggtcagaggaggcgctggacagggtccccgcatgttccggggtcagaggaggcgctggacagggtccccgtgtgttccgggatcagaggaggcgctggacagggtccccgcgtgttccccggtcacaggaggctggatagaggctccacatggcgtgtcaatgccgggcctgtggacactcagtctgcatggttcccgcatggccacatccagggaagccacggccctgcccccaaggtcaggactattcctggccaaacagaaggacctgccgcgcatgacctgcatggagcgctcggagcagagggaacgcactgaggtgctgccatcaggaggggaacggtggcgggccctgcgggaagaagctctcagagcagggcgggctgtcccacttccccttcctcctgccccaggcccacaccctctcctgccagcaccccaccacctaaacacagaatgcggctgcgctgccggagacggtggaggggggataaggctcagtgggaatggggcccagccccactgcccaccacttaaccacactccctaacccgaatatccctctgtttcctcaacactaaataagggccaaggtgaccacagaaaaagctgaagggcgtgagcaggacctcactgtccacactgacgtgttggctgctgctcccagtggccccagctccaggatcctcttgtgccccttcccagcacagaagggagcgagagccaggcccagggagcggagtgcgtgggtgcagctggagggcaggcggctgtgtgtgtgccaagtgccgggaggacgaacaagactcaggcctgactcatctcatattcctgaagcacctaaagtgggctgcacacagcaggtgttgaacaaacgcttcctgaacgggagcgacaaggagcctctgtcctctaagagacaagagccttgccagggaggactggggagcccccagagagccagcgcagacgatgaatgccagggcagggaaaccgaggtgtccccagcaagaccccaggtgggcagggcctggataaggcaggtacccacacgtggcaggccagagggttggggggggggggggctcctgtgtgtacacagggctgcaggaggtggcggtcagcggaaaagcagtaacaggccatgtgtcatactgttgcagggggcccaggtccatcggactggagcagaaaaaccagagaagaagcctgaggaagaagcaggacaggccaccagacccaacggggaggaaggcgtctggatgtcccagagttagtgagagggccttagccaaggaggcaggcacatcaccaagtacgaggtggtctgcaccctgcctctgcaggcctgggcggtgctgcacaaagtcccaggagatcctgaagtgtgcccttggtaaagaggacagtggagacaaagaagtatttgcaatgaacaagtgaaggcccacagcaaacacccagcatggcacagcactgggcaccacccgaagacaaggaaacccgaccttggggagctcccaatgcagcaggagagggatccaggctctaacgctgggaacacagccttttctagagataggcctggcagaggcagccaggcaggcagccaaagcgggcaggaaagaccagaagcagctaagagtctcctgcaacatccacgttccccaggcccctccttcctgaacagtctagcgggccctgggggccaccgtcagggaggagcaaggctctgcagggaagctgcaccccattcccaagggcaccttcccaagccaagtcaacccctgtgcaaactaacaggcagtccagctccacaagcactgctggtgcggacggcacagaggctgggagaaacccacaaacagaggccacccacatggtcgtggtctctacagacaggcagctgcccattcacaaggaggaggcatgatatgatatggtctgactgtgtccccacccaaatctcatctgaaactgtagtttccataatgcccacatgtcatgggaggtgagtgaatcacaggggcagttacccccatactgctgctcacgtgatagtgagctctcgagagaggtgactgttttataagggacttttcccccttttgctcggcacttctccttcctgtcaccatgtaaagaaggacgtgtttgcttccccttccactatgattgtcattttcctgaggcctccccagccatgataaactgtgagttaattaaacctttttcctttataaatcaccgagtctcgggtatgtcttcactagcactgtgagagtgaactaacacaggggtaagagaagagagaagccctgccagggagaggacagcagcaggaagcacccaaccatgaagtgtgtgtatccacagggccccactggcctttggcgcaaagcaactcacttgtatccacaaacatcccaacaactgccagacactcagcatccctggccccagtcccttgcacagcaatggcccctcaagtacacccccaaatgttccctagtgtccctcagcatggggcaggacaggagaggatcaggccacccaactgccctaggaggctccagcccatcaggccagctcagtgccccttacccaccctccaccctgtgcacccgacactcatcccaagccgccagccggccactcctgaccacaatgccggacgctgtgctgccaggggtgccactcagccacagcctgtcagaccctccactggagtggatggggcagcatccagggcacagtgccagccctgctctgggggctcctctgcagaacggggcctgagcctgacacacgcaggacgtggttggcggtcacagatctacacggcacactgtgcaggtgaaccctccctcctgaccagcaggacctccccctgtgctgccatcaggctcccagaagcaggaggtcagccctgagtggtgtgtcagagccacgggagcttggccgtgtgggcgcggtgagcacacaggggtctgcccagcatccgtagtgcgtggcatgaacgcggcaagatacacactactcaacacactgggccagcattttctccccagcaagcactatcaaggctgttgttggtgacaggccctcgatgtccaagttccctggggcaggtgacggaagtgaaggaacagggccgtccctcccagcccctgcccacatactgctgcccacacactgcctccatggcaggttcatgccgccaaggagcaggctcggctcacagtcttccttccggataaggggctaccaccagctaagcacatccctccaaaagccacgtcatatctcacaggcatttcacaggtgacgtgaggcacgcgcagacacgtccctagcattccacagccgtctgggtcacagcctgctctcagaggagaagccaccccgcgattgtgcctcccgtctctctccttgacctgcagtgcagacctggagctgagacgtcctccatcaaggccaaaagctccacacgcccagctgcctgggctcgccccagcctccagccccacgtgacggtctgcctcccagacccctgcgcggacaagcaggagcggctgggctcgagctccagggcttcagggtgactgctgcccggtgctcttggtgaagccgtgtttccacaaagcaagaaggttcaggccaggcagcctggactcctgctgtgtttcatctactgtgacatttctcctgtcccagtgccctcctctccctctccattatccccccaaaacaagtgaccaaaggagtgccccgcccctggttcacagacatgagaagctcccaggccatggctctccgcagcgccttccctatcgcatctccatcacccaccctttctgacagtggcccacatggtttaggacggggtgagagtcctccatctcccacccagatgcgatgagcaggagctgtcgtggggcgcacactctctgtagctggccaaagctggacgacgccacaagagcagctctttacatcctcctggccctgtgcaagttgaccccaggcagctctcaggtcccgactgtggggacagcacgtgcccgagctctgacccacatgcagacatcagaggcctccaagcccttgacttagtggcaggtgggctacagctgcaggacagagggctggagctctggagggtaacctgtgctgagtgacaatgcaccccgaaacccagagtgctcctgaggagggagagcctgccagtccagcaggggacccctcagcacagtcctggctgcacccatacagctcacacagatggcagccacacacgtcccacgacaactgttccagacccctaggctctttcctgctggctcctcgctggggtccaggactctgatctgggatctcccctccttccaagcatccaaccaggagctccttattccctgaaagccgccctcagcatcctcctcactccacctcctcccagcatgcgcccaaggcatccctagcaatgccccaggtggaggagccccagttcatgctctccatcctcagatcaggccctccagctctccctggggaccaggtggcacctgccttttcactcctccaaatgaagtggagcctcctgcagtcccacgccccacactgggtctatggtaaggccacctccccctctcttggccctctccacctgctggctttgcccaacacagtctcccttccccagttgcctgtccttcaggaccattccttacagactggctgcggcgtgtgcttaccccaacagccccgcctgtatgttacagcaaatggcacctcctaaagtctgacccagctcaacacccgccaccacttcctcccagctgataacgaaggctgcgctgcagcagcctctgcctccacagccagcaccaccttctgagaaagcctaggactggccgccacaccctggagagcctgggggcgcagccttggggtcaccaccctgcaatctgcacggcttccagagcctggcacagggaggaggcactcgcagtgcaggaaccaagcggaagccccacacccagggcgctgccttctgccagactccccgtgcccccacgggtctgactcttgcccaccccacccagaggcttcctcagagccaggaactgtgtcttctgttgctctgtttccccaacaacacaaaaccaaggcgtttcagaaacataataattatctgagagtatcacttcgagagagacttgtaaacaagagtatatgccaagaaagacagggggtgcgggacaggaggcgggaggcagcctgcgagcccccatgggaggaactcgggggacagcagggcctcaggagctgcttccgtttccaaggctgcaggcagggatcagaaaaggatcccaacaggctggtgtggcctccagggcggggcgaggaaggtcttcacccctgcacctgctctagggcaggcgcagacctgacgtggggaggcccagcaaggaagacaggcggctgccatcacagcacaggtggactcgagggagatgggcccaagtggagtcgcacggtgacggcagggctcctgcagaggcacaccagccccagccgcaaggacactcccggcgcaggctcccagggcaggcgccccgccacagcattcaccaggacgagctggaccaggtggctctggggcccttcccgcctgaggcctcacgatctgagtctccactcactggtgagccccatttccatgtgaggtgtaggcgctgggtgctgccaagaggacaagcccagatgcggctcctccgcctctcccaacctctgttcagcgtcagagcgaggctctgcaccaggcccccagcacctgccaggcaccgtggggacaggcagggatgagggaggctgcggatacgccacacacactcggtccagctggagcctcccgggcagtggcaggcacgacctcacagcccccacgggagggtcgttaacagagtcccggtggccagaggtgtaccaccaggcaggtgctcactgacactgtccccatgggtcaggcttcattagaaaccacagacctcagaataacaggcctctgggctcctgggagggagtggggcaggactatgctgcagatcacggcatcctggaaatgttgccagcaggaggccgcttgggcccagagccaaggtggccaaactcagcctccagcactagagcctgggggccaggagtcctcgagggttgggtggggagggaaaggtcacacctttctacgagcctgatgatgtcccacctccctcgcaggcctgtgaggtctgtctcactgtccctccagacggtgaggtgtgtctgcctcgctctccaccctctccagcaccgggcaggggctggcacagcaggaacacagacccgtgcagcagccagatgtggggacacgtggacacctgagggaccggcaaaggcgcacagaagggctagagagccaagacgcaccaagacactggggaaaagaccctgggtgttaaaagtagcttctggggtggggagggggagactggagggacagaggaactcttgggaaaaggccttgagttttaaaagtgtcttcctggcttgtctggagggacaagcagaactgccactgtctcatgtcatccacagaaaagccatcaccaagagaggtcggagcagtggccaccccgcatgtggccagagggctgggacagaggaaacccgcgggggctggagaaatgctcagactgcccgcgtcagacctgtccacctcgtgtgccttgcctaatctcatacctcaaagtgtcttaaaatattatctagcaccttgataactgttacttaaaacagccaatccctggctgggtgcagtggttcacgcttgtaatcctaaaagtttagtaggccgaggcaggcagatcacctgaggttgggagttcgagaccagcctaacacggacaaaccccgttactactaaaaatacaaaatcagccaggtcccagctactcgggaggctgaggcaggggaatcacttgaacccgggaggcggaggttgccatgagccaaaatcaggccacttcactccagcctgggcgacagagcgagactctgtttcaaaaaaaaaaacagccaatcaccaggtcccagaatcacaaaccagggagttgacgctggcctgctccaggcaggtgagactcaggcaggaaggatgcagccttggtccaagcagctggcaagtcagccccagtgccagagccacgactgccacctgtgcaggtgcacgggtgaagggttgctaaagctcacccccaggcgcagctgggaagtcaaggcgcaggatctgtccagagctgcacatgtgcaggccatggcgtcagtgtgggtggtgacggccgccgtccacccagcgcccctcccaggtgagcttccccgtcaccgtctgcccatcctgccctggtagagaagtgtattatcaaggcgaccggtacctcacctgcctcccttctgctgagtctggcttaaaaagcagcaggggagccgggcgcagtggctcacacctgtaatcccagcactttgggaggccaaggcaggtggatcacgaggtcaggagattgagaccatcctggctaatgtggtgaaaccccatctctactaaaaatacaacaaattagccaggcgtggtggtgggcgcctgtagtctcagctactcgggaggctgagaggcaggagaatggcatgaacccggaaagcggagcttgcagtgagccgagatcgggccactgctctccagcctgggcgacagagcgagactccatctcaaaaaaaaaaaaaaaagcagcaggggagctcagccagctcagggactgagatgaaactgcacgctacagcttggagacattgcgggagggctcccagcaagcgaaactgggctggggtgcaggacggagagagggcgctggtgaggccctggtcctgtgtgtgagggcggctgacacccggtgggctctgtttgcgcttgagctggtgacggtagggtttccttccctgtcaagcaggagagcaccccagtccacccagggagcacccaggaggagccagccccgccaagggcacgcatgggaggcgtcaatccgctggagggcagcagccctcaagcgaggactcacggggacatgcgataccaggaagcgagtcggaggcaattaagcctgtttcagagtgcacttcgcaggcggcgctgaatcgatagatcctccggcggcgtggtgctgcaggtgaggaatcagtcaggtaaatgcctcccaatctgttcctgctgtgcaaagaatcagcgctgtttaccactcaagccagaaataaataaataaagctgccaattagccagcgcccttttccgctctggcaagggctttttagcttctccaaatacaccagagtcctgcaaggctgcacacaagcaaaggcagcccaggcagcaaggggcgggggcttaggccccgggggcaagaactctgcttcctgggaagccccctgtagccaggtcaggctcctcctctagacggggaagccgggcaaacacctccaggagcaaggcgaaggctctcagtacccccagtacagatgcagccgggagcccccagctctccacaggtcagaggccacgccacgcccctgctcaactcgcagagcagcaaggcaggaggggcaggccatcgggcagcggtgcaggacccacaagggtcgagacatggagaggaggcaagcccacccagacaggcctcttccaagactccaggggcacgagggctccaaagaccctcgcccaggagcaaaacgcacagacacgggggtgtggaactaccacggggcgtggaactgatttgggaagagcccaacgtgccgaaaggaagagcaggctcccccaggacagagagtaagaagacctgggagatgagtgggcagaaggcctgcctgctaccagggctagtgaggaaacagctgcacccacagcctgaggggacagccggcctgcatgtggcccaccccagccaacagaggcagactgcccaggggtgcagtgagggcaggatggctaggaagactctggcagagaggaggtcacgaagcccccgctctgagctcggcaaggagcgtatggggctccacgcctccccaggggcagacctgctgggttctcacacaccccgggagggccaggcccaccctgccccaccctcctctgggtcaggagacagccattccacctgggtgcccggcgcttgtgggagaaactctgaattcaggagccttgctcagtgccaagcacggtgacatcacatacaacagaggcacctccgggtgaaggaggacgcaggggctcggccagtgatgccagcgggcctccctggagcttgagaagggtgcaggagctgcaggcggccttccagccccagggcaggagacaccagtgagcacggaggacacacatgggcatggctgagggcacagggatgcaggtggttcctgctctgcatcccgggccccttccctgctgggctcccggcccacactaaggatccggtcctcacagcgaccccaggaagtccctgctgtcagggctgcactttacagacacaggacctgccacagaaaggttgcgtcagaccccgggtcatgcagcccacagtggcacagcagcagcagggcaagtcaccgccactgttgccaggtgcactccagcaggtcctggacccaagggtgggggcggcgccacgaggcaggtgctgacaaggtgggtgggggtggtgccccttctgatgactggacagatgcccaggtggggacaaagaggacacaagcagcagccctgagccgagccacccacgcatccttcctcctcatgctggccccatgtgtcccccgggcgacagctcaaaacaatgggtagtgatgtctccgcagcctggtgagcgagctccaccgtacactcaggatgagactgtaacagggcatctgagatatcctttgaatatttacgagttctcatctgcccaggtgagcgagggcctgctgtggcaaacccaattctagctacaacccccaccaggtgaggcagcacctcaccggcaggaggctggctcgaggtttctgacgactccaaacagggcagtgagccactggccctctcacccagaggcaggcgcccagacaccaagcagcacgagtgctccagaaactgcagctcagactgagctcccacctccagctaagggcttcctggggtcatttaccacagctctgaaaaataaactgaggagacaatatcaagagagactcctgacatttgtcccgctttaaaatcaggagaacggactacctgaaagtcagcttacgcgtctgttttaagcgttgagccagcactggcatctgaggaagcagccagttggcccctgggcctcctcacgtttacagcgccacaggtgagaaagtgagtggggccaggcggcctcctggagaggggtcatcttccatgggctgctttccacaggtggggctgcagcccggggcgctggagcagtggactcggggacagacccaggcttcggtcctcactgccacttcctgccaggcggccctcctgtgaagcgagggatggcacctctgccatatggcctaggttcctgcaaagaccgggcaggatgaaggagagcgtctcgggagccgagagcagacacaggcaaggctcagtgcgcggcccatggacgggggacgcccacagagtgcaaccctcggagggccccaggttgaagactccacctagaaggggatggtaacaagggcagcttcgaattccattttcaataaacacacaggcactcgggcatgcacagaaagggcagaaccccagggcagcagatgtggaccagaccactggaggcccccagcctggaccccaggagcctggaggtcctgtgcacagctgcggagctatcttcccccctcaggcctggggggcagcggggacacctgacctgacagcccaggccaggcacaatgattgtgcaccatatggccactaagaatcgacacaggccgatgccgccagccttccttgggaccaagcacaacccaggcccagcccagctctgaaaggcagtgtgaggaggcccaggagcatctctggggaccggcctcttctgtcactcagagtttttaaacatgcagcttagtaggttccttctgcaaggaagcagagtgaccgctgggcagctttacacctgtcgtcaaccctgcagtgagccacgagcctccgccaggcaggtgctcactgacactgtccccatgggtcgggcttcattagaaaccacagacctcagaatgaataaccccctctcacactgccaggcaaatcagctgatcagcaatgcttctatgtatccagtagggcattttaaacaacggcagattacaactgagaacctgggataaagccagcgggccaagtcaggtgtgagttcagtcacgaagcacatccgaggcctcgttcccagggaagaacagagcagacgcgggtgggatgaagacatctgaacactctcctggagggggcctctcagtgaccccactttggggacagtcttccacagtgctggcctgacccgcttgttccagaagagaggtgctcagggctggcatgagcccacgggcctttgctagtcatgggagtgccacagagaagacgtccccgccctcccctacttatgacaagggggagatggacgaaaatctgaagtgatcagaggggcacaaaggagcggcaactcacccagccccagcaagacacaggaggctgtagagtggggcccctgatggagcacccaaggggcaaggagagggcagcagggacagcccagcacacttgctccagaggggattctcctgagggcaatggacacacagcctcttgggaagctgcttcgtgctgtgccacggaggagcagctgcacacgggggagcgggcccgaccacaccgaccggtaggaaagaccaaggtccagacgtcaggaacctggtgtaggtgggcaatgagggagcagaaacgacctggggtctagggtggggaaaaaaggcaagagaggaggagacccacaggaacccacctgcagagaggagcggacccacaggaacccacctgcggagaggaggaacccgcaggaacccacctgcaattacaatctcacgcccaccaaagacccctgcactccgggaaacgtgcaagagcagccggcactgtgggcgtcaggggagcagacgcctgctaggaatgagaaagcctagggtggagttgctggggcctcagaaccccactacccacgcaggcacgcagctggcaatggccccagagccggtctgaactgactccgaccagcggctgtgacctcaagcaagagacttctgctcgcacctgagagattaagacagtgtccacctctcggaacttcatgatgagaacaaatggatgaaaggccctgacactgagagacattcgataaataaaacgctttttaaatcacagtcgtcggttacaactcatcaactcgggctctggtccggcctcatcccctgttgaggagctgctgacgccctcccagattatttctaaattaacatggttctcatgaagccggacaattgtcctggtttgcatacattctttagagttctctggtcccagactaattattctgcattttctgtcactgaatcgcatttgtcatcagcagctcagccacctctcatctcccaaacagcactactgaaacctggcagggccatccatgcctagagtccccgaaatgcagccctggtgccagaaagagagggcggaggaggccagaccaccgtgaaagacctaggcagttcagagttcatgaaacactcgctcatcagcacgggagtcacaaaaagcacagaacacgaacaggaaggctgcttctggaagatggccgttcaggagaggccaggtgacctgccctgcctgagggaaggccctgacgggagtccctacacccagaggcctcgcaaagggcacaggcacgccaccagaggctgtgtaacatggaaggatgagcggcaaagcagaaaacacgatgtgtctgcaagagggctgaaggctcagctggggccttggccattgcagggatcctggcggggacacagaggggctgaaaccggctccctctgcccttctcaccctggggacaggacaggtggctgctgggacctgccctcagaaggttcattcggccaccctcaagcccgtcaggccacaccacgcctccccaggagcacaaggccccatcttcagctcacactgcagtctctctgctcccacaccttcaggcttcccacgcggcagtcaggcacacggaccacagggaggaggagaaaagccagagggggacacagaccttcccaaggcttcagggcatctggaccttgaggagatggggagtgctgctggcgctgaccaactgggcagagtggaggtggtgcacgaccccaccacgaggacaaaattgggtttgtgggcaggcagctctctgatcggaaattccttccagtcccagagccagctggaaggggcagggaccgggcaggcgcattccatgaggggcccgcaggatcccgggggagctggggccaccagggctaacccaccgccaggcagctcacatgtgcagcaggccaacaccaggcaggccagggggcagggagggagtgaaagaacaagacgcctggaagagggaaagcccaggtttttgcctgtggacatctgaatgtgctgtggcaggtatagaagagtaaaaggtctgtctccgcgggactgtgaatgtggacaggcacgagcaggccaagccacccagcaggctcacggcggctcctgtccacacggctcctgctaggcagcgcccctcctgccgtgggtctgaatccgtcacctgccagtgacgaggacgcgaggaacacgcgcttctcagagtccagtcacacacgaggcagcaggacaggaaccccaggtgcctcccgtcatgaggagagagcacacacacgatcccatccctctggaggctgcctgtctaacaaagatggtctccctgacgagagcaaggtggcaagacagacacagctggacacgcaggctcgagcttctgcccagagatcagaaaaacaaatgcagttatttttacacgcatgtcagagacagtccaaggagtgctctctgcaccccaggctcgagccaacggcctcccccaggatcctgtctacacacaaggaaggtgcacaacacagccaccaccgtcggaggggcacacaggcaggcagctgggtcagcaggtgcagacggactcatggttcccatggcacccgctgccaggaagctcccaaccagtccaaaaagctgtccttctggggcccagcagaagggtgaagaaaacactacccaacagaggggcagggatggggttaaaagcacctgggcaggcagacagactccagcaccaagtgggtgcaggaaatgccacctggctgccccgatgcgcctcactgcatcaaaagcacctccacatgtcaggaggcaaatgccctcctcttggatttccctgccctgccttcggcccgcagcaggtgcctggctgggcgcagccatggagctcacctgagaggtccagggagctgtgccagcagcattcaggtgcctccccgctgaaatatttcagtcaccacgtcctggggctagagaaaagctagcctggacacacagcacctcgaggccaagtccccaagcccagagctctctccacgccattacagcccccaactcccaggagttccccaggggcacaccagatgaacagaccgagaaatttggaataaggaagcaattgagaggccagagcttaactctctacgtcgtctgcggcaggtctgggaaaggagaccagcttcccacatagtcttgggcctctctctctctctgggaccccaatgattccaaacataaactcaattccaaaggtgtgtcctatcactcctacttgtaaaagaaaataaaatgtcaggaccctctcagtttattatgccagggggaaaaagttaagccccggaggccgaagctgggagcgtgtccgcgactctctcttcctcttagctcttgttccgtaaataactaggagagaccaaacaccacacctctcccacttccagtcaccgatctttgtgatggattcactgcctctttcactgtcctgcacctacagaccagatggcacaagatgcctgctacatcttcagtgcgaatgccaaatcaaccttcccggaaagataaaggccaccgcatcgaatccgatctttctaatgatgcattaagcctctcgcagaaggatgctgagatctgctaagcttccctaaacttgtctacatgaatgatccggaacttccacgcttcggaacactgacttccattctttggaatctgtgcttccctggtggccgtcctggaagaaccttgcacttgaataagctctctttaaactagattcggacgctttggagtattttgggttgacatactgcactatgagctccttcaagagatggatgagcagcgtgtcagccttcttcgggccccagagcggaccctgcacacgataaacactcatcccaggcacttcaggaatctgcaaaggcagtcttggcccaaatgcttaaaaacagaagggacgcatgtactatggtctggagaggcacaatccccctcacttctccaccttgtgatgagaggctacattaaaaatggcttacgcaccataaaatcagttctattcatggtgaggaaatacggaaaggcagtaaaattggcagagcatggagatgagaggacactaaactccctggctctctaaggaaacagggagcagctgagactgtgacaggaaaaggaatttaaccaatttaaaattcaaagcgctgcttctgttccccgacgagcttgtcagtcccaggggacctctgcgcaggcactgatggtgtccttgctcaaggcctcccagctcatcctcacaaatgtgctggaacattcgtgcctgcaccagctgggcccccaggttctcatccagagagcagcaacagggacagctcaggtgtgtcccccaggcccacacgcctccccaggggtgctctgtgcccttcagcccccatcagcccttgtcctcaccctggcccgagctggctcaggctgggaaggtcagcaggatgtgacagccatcgcacctggggtctctctggtcatgacaagggacctgcttccttctttcggcaactggcagtcacacaagtcctgtgagccccccacaagggcctgaccatgcacacgtgaaatgatggagggctgctcaggtgcctctaatggaaaggctggtgaaagatgtgcctcgtagacccgccgcggcgctgcctcctgacgctcagcgtggtccctctcttctccaagcagtcagtgaggctgactcaggaggaagctggccccaactgcattttgtctcaatctgacccctgggacagctctctctagcctcatcttacttgctaatttttgttttaaatttacagatattcttttttcaagcaattataggtttacaggaaaactgaggagaaatgagagttctcatctacccttcagcccccaggcagattcccctgcaccgtgcacgactgcagtccattcattacaactgatgaacccaagtccacagtggacacgtgggctcacttgtcatgtcttacattctcgggtttagacgaacgcatgtctgcagtccctgtgcgaccgcgcgtccaccatcacggccgcgtgcagtcggttcactgctgcgtgcgaccgcgcgtccaccatcacggccgcgtgcagtcggtccactgctgcgtgcgactgcgtgtccaccatcacggccgcgtgaagagtaggttcattccccaaaaatcctctgggtccgcctgcgcatccctcttgtccatccctggcaaccaccgatctttttactgtgtccacagttctgccttttccagaataccacggaggagaaatcccacagtacaccgcctttgcagactgtcctctttcactgtgcaatatatatttaagattcttccacgtcttttcacagcttggtagctcatttctttttagctcagaacagtatttgagtgaatggacataccatcttttatccattcacccatggaaggacactgttactgtgtggttcccgacccctccaaatctcaggttgacaactgatccccacgattggaagcaggacctgagaggaggggtttgggccatgggggtgggtccctcatgacggctcatgctgaagagcagtcctcacttcatcagttaccaggagagatgattgttacagggagcctggcgtctccctgctctcccccttcctgcgtctgctttggtgaggcgcctgttcagagctcacccattttcaatgctgagcatctcctcacgtgcttctccgtcacccacgtgtctgctttggtgaggcacctgttcagagctcacccattttcaatgctgagcatctcctcatgtgcttctccttcacccacgtgtctgctttggtgaggcacctgttcagagctcacccattttcaatgctgagcatctcctcatgtgcttctccgtcacccacgtgtctgctttggtgaggcacctgttcagagctcacccattttcaatgctgagcatctccgcacgtgcttctccgtcacccgcgtgtctgctttggtgaggcgcctgttcagagctcacccattttttaattgggtggtctgtttccttaccactgagtttgaagagttctttgtataatttggataacagcccttatcagatatgtcttttgcatgacggtgaaaaatattttctccatttggggcttctccttttattctcaacagtttccttcgcagagcagccatttccaactctaacgaggtccatctcatcaattctttcagactgtgcctttggtgttgtacgttaaaagtcactgcctaattgagagtcagctagatatttccgccgctatcttctaggagttttaaagttttgtgctttacactcaggtatgtgatccactctgagttgatttttgaggaaggtgtaaggtctgtgtctagatttttcccctgtggctgttccgctgttccagcaccatttgctgagaagaccgttttcctctgagctgcctttgctctgcggtccacgatcagccgagtatatctgtgtgggtctatctcgtggctctctgacctgttccacagacctgttcgtccattcttccatcaacagcgcaccaccttgatcactgtggttttacgctaagtcttgaggtcggggagtgtcagttttccggtgttgttcactggtgttgtgctggccattgccatcttttgccttcccatataaactttagaatctgttgatatccacaaatataacttgctgggattctgactgggactgcacagaccctctggggagaactgataatatattgactcctcctacccgtgaacatagaatgccgctgcattgatttacggctttgatttctttcatcaggtctggtgatttcctcacacataacctgtaccggtctctgtgtctacactgttttttggtgctaatgtaaatagtactgggtgttgatttcaaattccctctgcttgttgctggtacacaggaaagcagctgacggcgtgtatggcccataccctgctctctctcaccactcattattctacaagttcttttgttagttctcagaattttctacatagacgatcatgtcatctgcaaacaaagacagttttatttcttccttcctttattccctcttcttgtcttactgcactatagctagtacttccagtacgacagcgaataggagtggtgagtgggactccttgcctcgtgcctgatcttagcgagaaagcttctagtttcttacttggttttaagacggaaatagttgacaagtaataagaaattagcttctctatgacaacaaaaagaaaaatctgcccatttaaacaggaccagtcaccagagcccaattgtgtccagcagctgcacacgtctctggagaggccaccctctcttaaggactagtcttggatttgtggggttctcagagagcaacttgtggctgcccaagttcctggctccaccagaaatcaggtgggcatgatctccaggccccagggacacccctgctgctcatctagggcaagaacacctgaaagaagtcagctctgctgcttatgggttgagccatcttccttcaactgcccggaatgctgcaaagtgggccttttctaggatacatgagtcaccgtttccagaaaaaccagaactgaggacaccttcccagacattcaatgactgacgttcattaatgatgttcatgttcaacacacaaaaaacaccccctacaatctaatcagaattttgagcaaacactacccagaaaggtaagactagccacgaaaggtgtgaaggaacggtgagcgcacctgccttcagccctcacccacccagcaggcaaggctgagcagaacctgtgtgtggggccctcaggccactaggccctccttcttccaactgcacacctgtgcggggccagacttattccacagactccaaaagaagagaccgtggcagatggacgcagacacgagatgctcccatcttctatttcaccagacactgaagagatttgtaaaaagtaaaaaacaatgccattcctctcactgtctcgttttgtgttagaaaatgcatttttcataaatatattttgttaagtgataatgaattgtttttaatgagattataaatataattgtaaataatgatttaattttaattttaatttccaaagatggtaaatactgatagttatgattccccacaaataaaaactctttgttttcggtaattgtttatcattaaaggggcctggactgacaagtgagggcaatgctggtgcagaggaaggctcaggtggtgggcaatgtccgggcctcctgccccccagctctcacagcgaccctcgggacaatgcccaccagctctcgccacctctcacggccacatatgggagtcctgcctgccacctctcatggtgacgtgtgtgcacatgtcccaggcccaagggaaagtacactcatgaagggagcaacggcctcagcagagacctgaatctgagcctttggaggtgagtccaaggatctctattttcaggctcttttcgccatataactcacaagcagccaggcatttgggaagcgtggccatgatcaggaccacgcggcccaacgctctctagtcccctaagggattcactgctggtttctcttcccaggcagagggaaagctccttcagggcaggggtcacagccttccttctcctagagcccctatgtccactccaagctcaatgagacagaaacaggaagccgcacttgccccacgctgaccaaaaatgcctgtcacagccacgtccacactgttcctcctgcagactctgcgcaactgtgtttctcggccacagtattaaaaaagggtcagcattaagaggcttcatgccctgcggaagcgacctgtgatatctgagcttgaaaaagcatcgccctgatgagaggcaacgtggtgagagggcacaggcttaggagacagccagccctgagctcacaagcagactccaggctgagtggctccacaaccttggggaaactggggcaaagcgagaggctccccgccagcaggcaggatcagtgccagggcagggggacacgtgtggagtgcctggtacccacaggtgcctagcagtggatgtttctttgttccgactctcttacccaagtttcctaacaggatcgagagaccctcccaggtctatggcaccaactcgagctcaggatgctggcaacaccaacaccctccctcagaccaagtgcactcacctgcccaaagcctgccccttccaggggctcctgttctccacaggcagactctgagccagctgcattcctcggtgggggcccttcccatctcttggcatctcctcggggctcagcagtggaggccatggtgggagggcctgagactgattttatgttctgccaaacaaggaaggaaagcgtactccaatcgcctgatggcaccggagctgctctccacacctgcacaccaagaatcccagctcggcatggaaaggagccggcagtggccagcttcaaggctaagaaggaagctcttggctcagagcttacaaagtttacaacaagttacagggaaactcaagaaaagcgttcataagaggatgctcccaagtccactgatgatgccctgggcttggcagtgccgggcatgagagaggaggcctcgaggaccccacctcagtctccccagatagcagctcctggcagccctgaccctgctctaggctccgctgtggggtgtgggctgctctcctggggttaggctcacacaaaccccttcaaaataagcaaggaaacagaagttcagggcaccaaaatacttagggaccaaccccagcaagggcccttctcccatctccctattctcttcctgaagcaacaataaacaacattcaagtagtattcatttctgtgttttctccaaatgtttgaggaaatctacattctactaccaccttttgggggccaagaaagatgttcgcttgcaaaggacagaactgacccaagcaccctcttctcaaacgtatatggcactccagatgccgttttctgatttggggagctgaggtcagacaccttccgctctctaacagaaacgtcacagagcggcaggcatgttaccggtctgcttggcccatgcaagtgaggggcccacactgcctcctccttcccttctgcaccttgcacacaccacctctggcccaggtgagtgaggggcccaggctgtctcctccttcccttctgtgacttgcacgtgccacctctagccccaggtgcagacaggcttgtgccatggcactgcctgaaaacctcagccaggaaacagagcgctttccccatggtcccgggtcacctcaaagatgccacctcaggctcccacacaggccagatccacaaccggaacagaaacttctccaggaaaggtctcctgaccagcagtttctgaactgtgctcctctggccctggaggctccaaagaggggaagccaagcaggaggtggacgtatggggcaactacacgaggacacgataccggccatgatggcagctgctgctcacagagcgtttctgtgccgacggtgccatgtcggataactatgcgagggccacacgacaccagccacacgacacaggccatgatggcagctgaagttcacagggcgtttctgtactgacagcgcgggccagcccatgatcagagcacagagctgtgagtcccaggcccttcaccagggctgcacccacgctgcgctctcaccaccactgggcagcccctgacactgcggacctgagactgctgttacaaagggtttcatgggggtgggaggaaatgccagcttttttttaacttgctaaagagggtgagagaatgcaggggtgcatacagggtccaaagggaaggagaaaggaaggggatgcatctgctgccccaggggacgtgctccctggccaccgtcctggctgcggcagcgctcagcaggctggcggtggggcggtcagctctgcaggtgcacttagtccagagccactcagcctaatgaaatgaggcatcctgagaaccacgacgaggtgggcgccagaccaagtggcctagagagatgagcacttcagcatgcagaggttgaaaacagatcctactgacaaaacggaaggaaccacatcaagaggtggggattgggggcatgaatgccagacgcacacttccggcttgttaggagaagtcagccggaggggaagcagcagatggggcctcccccgctctcaaggccacaccgccatcgcctgcagcacctcactctgagaaccccaggcccaggggccaagcaagcactgagaggaaggccagcactccgctgccttcccccaggcaggctgcacatacccttcaaagaaacccattgagggtggaactgaccctaatacaaatgaggaaagaaaggctcgggggtcaagtgagcaggacccagtgacagagaccacagaccccactcctgcaaacaatgccgccattccctgagcacctgcttgatgttgggaacttctgaaatcttcaattctccactcatcttgcaaagcaagagtcctggacctgattttccagatgaaaagcaggacaggcaaggagaacacctctcagctggagtcaacatgcatcggagaggcccaaggtcccagcaggacaagcggtcttcctcctcagcagacgccccggtaccgaggccagaggcgaggaggaagagcaggcgaggctgcctcagcctcaccctcctgtgtggccagcccacccagacagggcgaggactgtgaggagggcccaacccccaggaagcaccccacaccatgtccacagcctaagccctggctgccacggggatcacacggcccgaccccctgagccagcaatgtactctcagccaacccatgggagcaccctccccgcacccccaccccaccctagctcacgggaccaccctccctctgagctcacaggctgcagtccagggcttgccaaggcgggagcgctgcgggccccaggacgcacactgagatgccccccaccctcagcagtgaaggtgactcccccagccatgcccccagggccacagccctgagctctgtgtcctgcctctggtctcaggaggaaccagacactaccaatgacccagcaccctgagagtatggaaaatacaacactcatgctgggagaagctgccaggggctggggccaaaggcagactgctgagaactccacagccacagaggacacccgccgctctccttcaaggctgagaactccacagccacagaggacacccgccactctccttcaaggctgatgggggaggaagccgggcttcggcagacccccgtccagatggctccagcaggggccagtgtgaggggctctgcgtggagaggccagctgcagctcggaccacacttcccccgaccctcaaggctaaggttttgtgggtggtttaggcctgagatgataaaaaacaattttatgcctaaaaatattaaaaagtaacaatacagatcagaaaaatccatgctctaggcttcactccaccaagtagagtctctttccccccacaggcctcagtttccctgtttttatggtctactatctggaccccgcccccccccagtccctgccctgctccactgcagcacagcacgccacaggccaggtggccaggcttccaaagccctcaactacttccctgcaggacgtgcatccttctgtgacctgtgcttggctcaagatcacctacacagcgtccaagcccaggtggcccctgcagacgcctctcccaaggcctcccactcttgtcaatccttggtggcttcctctgggccttccccaggccagtgtcccagaggcaaaggctcagccacattcaccactgcccaaacgtaaaacagtgactccagcacccctccagcagcccccgtccgccctgcacatgttcttacacaggaccctcaaaggaccctgaagggtgaagggtgccggtgccaccctccacgcctcagaatcggagagtgcaccagggccgaatggccctccgaggccctagctgcagccgcagccgcaaagccgggagcaagaggccaaccagggcagggacgccgagtgaccagggagaagggagaaaagaagccaggcatccctggcttagccacttccaagatgaagagcctcgtctgccttagacacttcctccaaaacaagagccatggatgtgggtgggagccggccccgcatcccagcacgaggccaggcccccgccaggagaaaccccaaggagcaaccaggcctccatgcccaacctcggctggaaagcaatgctgatggcagttgccttcccccagtccctgcatgccagaaagggcggctccatggccctgggacccactggcttctggaacaatctcctatggcaactgccacagagctaaacactcagaaagtgattgcatttgggatgaaatttttttctagtgcttgaataaaagggggagtttcacatttcatccacttccacatcccttaacaataaaaacttatttaaaaagccatgaatatgtaaatgccattttaaatatggaaatgcaaaacattcagggaaacagtctgggtgtgaaatattaacggcagctcatcttgctgaaagaagcaacacaagctggctaaagcagcaggcggaggcaccccggacagaccccagagcccagcggcagcggacgctggacccggccccgtcatgaaggagcgtgtgctcgccttgcgggctctgcctggggagggaacaggttcagacacccacctagagcagggccagccttgccaaagcctgcctgcatcctacagggccacgcagtgccccactgcggaggcccctccaagcaggcagacaccgcgtgctgcggggcacagccatgacacccgaccatgcctgctgatgacccaggctttcccctggagccaggatgggctggaccccctctcaggagagatggggctcgatctcaggcccagcagccagctgcagcctgaaacatgatggtgcctcagacaggcccccagaccatactggggggccacagagaacccggcattggcaggatgggcaccgggtctatgtcccccaacccgggacttcactagccctgatcaggaaaggactggaggaacaagaaggcaccgcatgagggagggaggccccaagacagacgcccgctcacccagacatctccatgccatgccccccttctctctctccctctaattggccacaaaatgtacaggcctggtacccacccacccccgctgaggaggccccacgaggaggttctaagctgagcacagaggagcgggcggctgcacatgccacaggcaccatctcacgtccaagtctgggcactgcaggcaggtgccgcacagacagcctggggaaggcccagctcctccacatggcctggctcccgggacaggtgccgccaagtcctcttttcctactaaagtcccagtggagaagagagggggactgagaaccaaaaggacaggcagaggccaccagccaggccagggtcgccggggcagccatcaccggccagcaggtggaccgcacagccgtgagcacagaatgggcctgctcccctgtcaccttgagcagcgcactctggggcacctgactcactgaggggtccatgttcaagtgcatggtgccagaccccaggcacagggatgtccctcacatttccccaaaaacccgctcactggggctatcctacagacagacaactgactcacgagagagacggcttttcaaagggcccacactagccaaactaacccgagcagccttcgccaaagaacaaggcaggcacgtgccagcatccgcactggaaccaccacaggaaagcagatgccatcaagggccccgttctagagacagacaaggagcctcaaaaggctgtcccctggtgcagggctgggttgggggctgaggcctctatggcgcaggtgcactgtgcgtcccaggcatggtccggggctgcgggagaaactcttgggaccagccccacatgggacgcacaaggggcagagggggacaggagcaggatacagacagatcacgcgggttctctgctgccggacggagcgcccctagctgccactgagcccacggtgaagggcacggtgccacccagagctcctggcgcgtgccctgccacagccctggaccagacaggcatggcaggctgccaccgtggaatacatggagacagcccattagactcaggctgattccacaccttctgccaaagaccatttacatcgagtggcgccaaagccgaacggacgcaacaaggcctctggccatgtcaaaccccaggggcccccttatgccgagagcaggtggtcaggttgagcatgagacttgctgggaacacatggctgaggccatggtcagttcaagggcaggccagaactggccatcccgatgtgctctctcacccacactgatccacggcaaattccgtcaccttgacctcccagatgcccccaccgcctaacccgtctgatcatcaccactggccacacacaggagacatcctgccccacagagtcccctggaaaacttacccctgccatgccctgaaggctcccagaaattgtactttcccattacctcaaaaagtgacagcaggacacggtgccagtgatgacaaggactagctaaaaacctgcaccctgagccagcaccgtccacaggctccatagaggcgactgcactgagcctcaaaacccccaacaggagtcaccatcaccagaaagactcgctcggagagccactcctggtagagccaaatgcaaacacaggccccaggaacctgggccagtggtggcttctccagcgggaggcccctcaagtgcaagaggggaacagcccagccaccatggatctcgtatgccttgctggtctctggatgactcaagtgcaccataattcagatgccaggtgacaaggccttgttacgtccttgagaggacggcctaaccacctgggaccaacagcaggaaagactcataactagtaaactgatcttcactcactcttgggaggtgacagaaacctgaggcaggaagaggctcagaaaagcaccgtctgtgacagaaaacatggtgatatccactcatcacacccaatgactctcgagtcccttatgcttgacaagggcctgactcctcctgacgctgcccaggcccctgatggcagcagtagatgaaacaggccaggcccaggcacctggaagcaccacacggccaggtgctccaggacatgccagccttgtggcttcaggccaagggctcttctgcctggaggcagcaaggtgggatcttcaaaacaaactgcggcgatcacagcccaggctggaatgcacttctgggaaagccgatgcacagaggggaggcaggggaggccagggcagaccccaacatgaagagctccatctgcatccacggccctcaggggctcccctctgtggacttctcagccggctctaccttaagtcagcatcgaggaggatgcctggggcttcaaacaggcaaaacagcaccaggcaggatccatgacccagggtctctgctgaggcagagaagcaaggccaaagccgagacggcagccacacaacgtgtcccacagggacccaggagccacctgcaaacacatcccacagagctctggagacccacaggcctggacgcacgtcctgctttcaccacctcccagctgtttagcccggggctcaagttcctccctgcaaaagagggaatcataagagcttccagctgggagcgtctgtgaggctcaagtgagaggctgcgcatgaagcacagcgcagcgcatggtgagggcagatgcgagacaaacactgactgctctcagcgtccccatcgtcattcatcgccgggattacagatgatacacctgaaccctggagccctcacggggtcctgagaggccccgctcccgccaccagccctctccaaagcacggtcttatttccagcacagcagagaaaccgccaagagcatggccccacgcatccctgcccgagcttcccagccctgttcttcacgagccctcagagcacgctggcctattcccccccagatctgaaagatgacagcatggccacgggctgggccacagaggactgcagcctcctgtcccggctcttcccacggcagagctggggacgccaggcagaggggtgcttgggtccctaagggccaaggagactaagagggcccggaaagggaagggaggctacagggcagccccggggtgccctgtgtgaagcgtgagcagagggcgcaccagatccacccactgattctgaacagtatgccctgtcctcagccccacaaccaggaggtccattctcagattctaagagccgaaacgaggcttgagcgtaaaccaggccaggctcccctacactgccatgaagctcctgctccaaggtaaagaggcccaggatctctgacacgctctgctcacaccagtgaccaatgacgccccatctgtccacggctaaaggaagggagaaacacacaggaggcaaggtttggtggttctgacccaacccccaggctgcaatgcactcaagcaccccaccctcctggagcgccttacggccagtgccctgtaggctgccccgctgcccactgagagccctgcctgctcctggctccacagccagccccggacccttcgtcacagcaccacgtcccggggactgccgagagctgctgcaccaggcacgttaccaacgtcatcccgctgaatcctcaagcagccccacagacactctctctgctgtaagacaggaattccagtgcagcacctgagcaaacccgcataaagctaacaagcaggctcctcgcaaccctggaaagcagtaagtcctacactgagagttccagaagcttcttgcctctaccaactccagccccaagaccagaatgcagcacaggtgccaccgtggggcttccagcctccagtcctaagagcgcagaaacattcagacagaaacttcagtccagctcacagcagcgtttggaactgtgcttcaccagtaaaaggggtcaaaactatagctcaatgctaggaaaattccttcttgctccaggctggttggtggcccagcagctaactccgagatatggtgtcattttctcttcctcaaacaagggaggtgatggcttccggctcggcatctgctcactgcgggatgatctgtttcctgcaccaggttgcacggcaagctgacatcagaccctccctgggcggccttccctaccttggaactcctctgggtgggagagctccaggatcctccctgaaacaggctggaatgctactgcagtaactatggagagaaactgaggcaaactttaaaaaggcagcaacggcaggaactccgcagaggagcccgacccacaggacctgctgaggtacctgctggcttctggcttcacggacgtggacatgtgtcatgttggtgaaaggaacaccaagtcaccaagacagcgactgtgggaagggcgctctgttccgcacatcagatcagcagagaaggaaagttacacaacacccaggaagtgcatcaagactgcgtggtgtaggctgctcacagcggcacactacgccggctgataggcaacattcatcttctaaaagccaagctcctgaaaacaggcacacgaatgacccagccgtcacttcagaagctcggcctgaggcacaagcattccgagatgctgccacgtgagctaccccagcggcaccgtcacagcagcaccgcctggaagagggagcaccgggcactgggctacgaggaacagggtaccacctcgatgagggagcaccgggcactgggctacgaggaacagggcaccgcctcgaagagggagcaccgggcactgggctacgaggaacagggcaacgcctcgaagagggagcaccgggcactgggctacgaggaacagggcagtggagccgcaccctgagaagctcctcagatggcgagaacagcgttcactaccagggaaagatggacacggccaacatacttggtaaaaactgcagaggagaacatacgtggtcacaagcacgtgcccgctggtccgcacagacgagggaaaatgcccagcagctgctctcatgacccgtgacctcagctggaccagggctctgttcttcagtgactacaagctactttcaatgagaaacaaacaaaagtgactttaaaatgaggcccgcctggcaaagccctcggggatctgggccaccgtggcctcccatcttctgccatgccgcctccttcacgctcatctgaatttctgtccaactgcctgtaagagacttgtagaaatgtgctcagctgttcaaccgtgcgaggctccctgaccccgccacggcaggccgcgacgaacacggtgtcccgccacggaagagagcagcagcccagaggccagaacgcaagcaccaaggccacgacgggactcatccacacctcattggccactgccagcgctgcctgtcctagggtctgcctccttcctgggccttggaagtgcacaaaagggccaggcactcagcgtcaccaggccccagaaagccttggtcgggaagtgtccacccaccagcaagcagcactgagacccggggacggctcagtgcccaggcgcagttcaggaggctcagacctcacagcaacccagtcgttactgccagtacctttcagctcacagagatgaagagaggaccaggtgcctgcccaagtcacatgaccagcaaggagcagaccagccgccccccaggacctgcaggcaagagggaccgggagctccaacctcacgcccagaggcctcctgcgcctctccactgccccatctcagggaagcgtctccagcgctcctggcgacgggtgaccagcgccatctggagcctgcaccttggctaaagaagcccacacagggcaataagccacacgtgggacagaagccagcatacagacacacacatgaaagcaagctggaaacgcttgtgagaacccaggatttcagggcagcttctccctttggcctcccagaccagcgcagtactgaggacctcgtctcacccccaagaccccatttcacagaacaggacggagcaccaagcgcgtccatgggatgccccaagactcacccttccccagggcgggtgccccagctctcagagggagcccacaggtcctgagaggccagccacagctggggttgtgaggaccacctgcccactgtagaggctgctccctgagacagagaccccattcccaaaccaatccccccatgggctcaatccacatctctgaccacagcgaaggcaacatgggcagcatgcagatgcgaatgttcccttccgtgtggccctggacacagagatgggcctgctgctgctggtcaaggcaaataattttaggaagcacctccctgtttggtgggagaaaagtacaggcaactttcctttcctttaatagttcattctgtttcatttccaaagtaaaatgatgaggatcgcctggtaaagtgtgaacgctttaacttcaaatcacttttaatgcctgtttcatctgacagcggctttgaaagcaaaaggcaatctttatcatttgaggtttttcagtaaattgatgtgattatgtccaacacaaccagatgcttctaaaagccaattttcaaagtgacatcagcccccaaaataagaaacctccttctggctattaataaattattaaaacactctctccacaggaggacaaggctgagcttgatcatcaatggcaaacaggtgagcttcaggccctccgcacagacccacggcctggtcagccgtgcagggcgcagagctcccctggggccccgttgcacggcccttccctctgccgcaagcccaccccactgcccaccagccccacaggtcccaccggatggggttcagtccctcatggtagctccaccttctggtcaggggcaggcataagaccccttcttagccaaggaggcataaggggcccttgctggcagtgggggtcctaggaaacgctttcttgtacagaaaagatccaaaaaagaggcctctcatttccgcctctgggtgtgatgccggagcctggatggcccctcacagccacgagcgaaaccagagaagagccgggctgtgggataagaagaaatacatatctgatcgtcatcccaggttccctgaagcccttgggacttcctgagtgaggggcatgtctcttggtattcatagtgagccccttccaatcacgcctgcattcatgctgacgtgaagactcagggtgggcccgctagtgaccgacgggctggttcccaagaccacatgaggccccaaccctgctgggaagacaagaaccctcctgatccaaggagggaccccacaacaggaggccaacccccagaccccatggcagtttagcacattgtcagaacgatggacggtggtgcctcagcggaggctcacagcacatggtggaaacatggggcaaacccttccctcaaatccctgctcccccatctcctcccagaccagggccaaccacatgatgaaggacagccatcccccaagagccagggggcacacactctcactcacccctaactctccaaagcaaacgcatccccacaagcaccctgggcggccaggtctacctgctggtgacggcgctgttcttgtccttcaaggcaagctccctctgctgcagctcaaccacgaatctggaaaggtcttctggagtcctgcaggataaacaaggcacactcagttccagctgtccccgagaagtaaacctgattctgcacacaaaacagaaggccaaaagcaacctctgtagctgatgctctgggacccaggatgtgtgaactctgtggacccaggtccagggcagcatgcacgcactacagcctggggtcaaccacagcccccacccctatgcaacaccggggagatgaccttagaaagccccgattttacttcacctgtagaaacagagacacgacctgacagtgtcactcttcagaggaaacgaaatcatgtttaaaaagcacccgccaggcccctggcacaggggaggtgctcagcgagttttaagttcctttcctcacctctccttcagaagacccacatataacaacaagagtaaaatcagcgatctccaggtgtagcgctttctactttccaggacgattccagattgtctcagtgaatgccccagcaaccctgttgttcaccgtttccattttttaaacgaggaaactcagactccaatgtgaaacagccgcttcaaagttcaaagtgcaccccgatgatcagcaacagctgagctcggcccgagccacatcttctaactcaacgctgggactccggaggacacagcaaggatctgagccatgcatgcaaagttacgccagtggtgtgtgagcattcccagcctcacaacctggggcacaaagccaaggctccctggctagactgacccagtggcatgtgagctcaggcccgaggacccatccttgttcttctcttcacctgtcatggaccaagcgcaggtccacatagaaagcaggcgctggcaatgctgtgagagccccacccagccccactcagggagcccgcaccgcaccactgaatgagcaacggggaccccgacattggccaaggaggctacctgcacccctggaaggagaggtcccagtcactctgtcagccaggcccccagagcagcctcgggtggatcccgggcacaccctcccagcagcctgcccgggagctcctctctgcgagtcagccacggccacggagaggcacactgcaaccacggacccctaacagaagccatcctgctgcctaaaacgcgcacgctgcaaacctcacgcactgggcccgaccagactctgccctgagacagccactgacctttcctgtcacttgagcaccctacccatgggcccccgaaaccctcatcagctcatccagcgctcacacagcccctcccccggtcttccagcacccagctcctcctccaaacagaggaagggccacttccttacagtgtctctggccacccccacgcccctcgccatcccatgcctgttttgcacggcacagaggacagctggaggccgccttgcccagcattagtttggtgtttctggagtgtcttccatcactggaacaaagctaccaagagcctgtgagcagatgtcctgcggcctggcccaggccctgagccctcacacacacccagggctggtcataagccctccctctgaccacagccaattcacacagagcacgccacggccttctcccttccacgtcccccagagaggcctcctctgcccacccaaagaacaggccccttgctgaacatctagtggggacagcgatgggtgcagaaggagtagctggcaccggggagaccccatctgtcctcacacacacaggcaaaccggggttagaaagcagctccgtggaaaaaccatttatgactgaaagaccttggaagagaaactgaactctaggacagagatgaaaggtgcagctgcccttgaacgccgtgaccattctctccagtttcccaaagcttccaacctcagggagttaaaaatatcagtacgaaagtaaggaaacctttccaagccaagagatattttttctgaaacatttgaatgagatatttaagttgttttgcattaatcaaaggggcttgtaaattttcactaactcagtgcaaagaatttatttacaacaaataaataaaaatcgcatatatccacatctgcaacggcgcctcccagcccctgtgcccagaaccagcggcaggtggggtggtcacaggcggcaggctacaggctccacctacacagccaagaccaccccgcctcacacccctcagggacctcacatgtcactggacctgaaacagcaggaggccagtggagaggcatttggcaggcagtaccaggccccagggttctcccagctgggatggttctctctcaccagagggcacactgcctgccacctccctctgtggggaagcctccctgcagcctgcagagcagaaggcagggtcaggagcatttgacaccgatttagaaacaagcttcttgccccaaggtacgaacccacccagcaaagctgggagctggggtaagatctcagagggccaggctctgctaaccatgttctgcgattcccagtgatgccaagaccatgataaatgcaaccatttagcaatgaggggggaaatgggagtggttcaaatcaactgaaaagtgacagtgacagagctctcttctgaagtgctgggcgcccacagatggcacacgcaccaggcagtctcctacgtcacccaggaaggcctctgtctcatgtcatggggtcaacgcctcattctggcactgatgggccacaggagaaacctgagtactctggagccccggggcatccatctccatcacccaaggagcaggctggctctccacattcccaccgactctgcaggaggctgcttccgggtggctcccctgcacgctcctccttgcctgaggtgggtgtgacctggagttgtcctgccccaggcaggaacagagagcatggcttgccctgaggcagaaggctggcgcctgaggcggatggtcccacacagaccccagccctcgggagcactgtcacgtgatgggctctcagcctggatacttgctggccacatccctaggcccccagatccctgccggctctcagtccccatgcgaccaggcccccatcatagggaggactgaagctgcagggcttgctattccagagccctccaaccacaggggcagccgtgcccaacacctcccacgggcagaagccgctggagggcacaggggcaccagaaggaatccctcccttcgcagcctcttgcgctgaaaaacccgcagtcaccactttggctaaaccaagcctcacgagccctgtctggccattcttgctcatgaccagggttcagcttccactcaaaagcacaagcacagtgagctcgatgacagccttcaagaacgtcacacgggaccagtctactctacttgcagagacagagggaaggccaggacatccttaaaggaaaaggagatggacccatgggagaaaacctgggtctcagccccagccctgacccctccaggctcaactccctacctgctcggctgggcttcctaaggctcacttccaaaaccctacggcacaggtacagtgcactgctattacctgacaatccctatgccgttaactttatggatgtggaagggacagggaggctggaggctgttttcagggtgtgcaatccaagcccattttcacactggcattgggaggccgggagaggacatgcaccgtggaggcggtgtctggatgtcgccggggacatgaggagaaaacacttcaagtacaatcatcaaccagcatgttaaaagttgtgaaattttgtataccctttgttcggcagtgtcaatcaaaagaaaatgtgttccccatatacaaaaatcaactggagatggattacaggctgaaacctaagacccaaaaatataaaaaatactaaagaaaacaaggaaaacacttcaggacattggtctaggcaaagattttatagctaagacctcaaaagcacaggcaacaaaaacaaaaatagacaaatgggactacatcaaagtaaaaagcttctgcccatccaagaaaacaatcaacagagtgaagagacagcctcttgaatgcaggaaaatatctgtcaactcttcggccaataagggactaacatccaaaatacaactcaaaagaaactcaaataacaacaattaaaaaaacataaataatcccacgaaaaagtaggcaaaggacacaaagagacatttctcaaaggatgacatgcaaatggccaacaggtatatgaaaaaatggtcaacatcactaatcatcgggggaattgcaaatcaaaaccacaatgagataccaccttacctcagcttaaaatggctaataaacagaccaaaaaacacacagacagatgctggtgaggatgcagaggaaagggaactctcagctgctgttggaaggaatgtaaattagtaccaccgctatggaacccagtatggagatttctcaaaaagctgaaaacagaacaccaccacatgatccagcaatcccaccactgggtatttactcaaaggaaatcactgtatcaaaaagatacctgcattcccatgtttatcacagcaaagatggcaaagatacggaattaacctgtgtctatcgacagacgaatggataaagaaaatggggatgtacacacagtggaatgctatccggccgtaagaaagaacaagagctgggccgagcgcggtggctcacgcctgtaatcccaccgctttgggaggccgaggcaggtggatcaggaggtcaggagttcgagaccagcccggccaacatggtgaaactccatctctactaaaaatacaaaaattagccaggcgtggtggcacacgcctgtaatcccagctactcaggaggctgaggcaggagaatcacttgaaccagggagtcagaggttgtagtgagccaagatgacgccactgcactccagcctggcaacagagcaagactccatctcaaaaaaaaagaaagaatgagagcctgtcatttgtaacaacgtggctggaatgggaggtgaccgtgtcaggtgaaaccaccaggaacagaaagaaactgcacgtcttcactcatgggagctgtggaaattcacctcctaaaggcagagagtagaatgacaggaactagtggattgaaaggtctgggtgagcggaaccacagatgaagagagttgagttaatgggtacgaacatacagttagatgaaaggtataaattcagttgttccacagaagaggagggtgactagagttaacagtgtattgtataattcaaagtagctagaagagaaccagaatttttcccaatacgtggaaatgataaatactcaaagtgatggttaccccaaataccctaaacttgcccattccacattctgtgcacgtaagaaaatatcacaggtactccataaatatgtaaaatattatgtataaaaataaataaatggtaaataaataaataaaagaaaatgggctctctggggatgaagtgtatgagctttagctagtggaaacagaatgggtttaaggcaatggtttcagagcactccatatcagaaaaagaaaagatgaaatggttttgccaacatgtggacatttctgaggccacaaaggaggtcccatcaagaacaaggtggaatccgatcaaacgggtcaggaggtcacctcctgaactctacaggaagcattccggcgccctcttctcgtattaacagcagcctgtggagaaggacggaggccaccatctggagtaaaggacatacccttgaaccaagcggggtggggaggaggagcccaggaggctctgggcacgcggaggagtccacaggggtggactgtgagctctcagagaggcttgcacggagaagcagcacgggagccggagagccgctcctccggcttggggcttctgtggcctggcaagaaggcttgctacctgaggaagactggaccctccaaaaggacgaggctaagagagcgagcaaaggggggtcctcaggcctgacctgctgacctgccacgctcttccaagaggacatcctgaggaaacccaagacaagcaccacacctggccacggtggcatcctgccaccgtgttgggatgtttttaattgtggtaaaatacacttaacataaaatataccatcttaaccatttttaagtccccagttctgtcgtgttgagcatattcatgttattgggcaaccagcaccacacctatccccagaactcttaattttgcaaaactgaaaccctgtcgcattaaagaggaactcccacagcccctctgctcccagccccagccacctccatactaccttccgtctctaagaatgcgaccactccagccacatgagtggagccatagagcatttctctgtgacgggctcactctacttggcatcacgtcctcaaggctcatccatgttacagcatgtggcagactctccttccttttgaaggctgagtaatactccattgtgtggctacacaacgtttatccactcacccgtcggtggacacctgggctgctttcaccttttggctgttgtgaataatgctgctaggaacatgggtgtgccaatgcctgttccaaacgctgcttttaatgatctcgggtggatacgcagaagcggcactgacagagcatccccttttcggtttttccgagaaccaccacaggctgttttccactgtggctgcaccaacttactttctccatctcatagtttttaatttaaaaaaaagctcaacaataaaaaaaataagcaagtcctcatagccataacattgagcactgaacacccattaaagctgatgctgggcaaaaaggtggtcaggcagttgctgcaaaaagcgcaggacacgaggatgtgctcggctctaaccaggacagtgggcgcatggtttcacggcgcgtgtggcgagggcagcgggcgcacggtttcacggcgggtgtggcgaggggagcgggcgcacggtttcacggcgcgtgtggcgaggggagcgggcgcacggtttcacggcgcgtgtggcgaggggagcgggcgcatggtttcacggcgcgtgtggcgaggggagcgggcgcatggtttcacggcgcgtgtggcgagggcagtggatgcatggtttcacggtgcgtggcgtcatgacgtcgggctaatggcatggaccacctgcaccagagtcatctgaggcaactccagcctgccccgccccaccccaccccactgaatcaagacccccctgaaggcggggcttaggggctgcacacaaactccctggtgattcttacacacaactacttccggaactaccgatcatctgcataaatagagaggggaggctgggcgcgcagtggctcacgcctataatgccagcactttgggaggccgaggcaggcggatcacctgaggtcaggagctcaagaccagcctggccaacatggtgaaaccccgtctctactaaaaatacaaaaaattagccgggtgcagtggcaggtgcctgtaatcccacctactcaggaggctgaggcaggagaattgcttgaacccgggaggtggaggttacagtgagctgagaccacggtattgccctccagcctgcgcaacaagagcaagactccatctcaaaaaaaaaaaaaaagaaagaaagaaaaggaaaagaaaagaaaagaaagaaataggggaaagtctaagcagaaaataaccctacagccttctgggcaagttaccaaaggcaattctttatgtcaccaggatgccacccaccacacgtgtgacagagaaaacactgcctgcggttctctgtcaatctgaaggacaaatattaggttacagaatttggtccaagtctaaaagaagaatcctacaaatgtcatcacaagaattctggaaactcgaacacctgaaactgcatgacacctttggcttctacgtaggacaaggttatggacttttgatcatttgatatatactggaacgtcttcaaaagagtgctaagtaatacaatattttaagaatagaaatcaatagtaagaaggcgatgggaacactgttgtggggaggcctggctccactgaccactccagcagtgcaggtcaccgtgatcaggaagcggtaatgatggaacaaatcacagcactcagagggctcctccccttcatgttaccatttgagctccccaccatgcaagtccacacctcacatgcgtaagaacccgcaaaaactaagagactgagaagagaaaagcagcacagcatgctcccgacacggaagacgctgcccatctgggaggagtgggagagccggtcccctacagtctctgctcagtgcagcacaggcccagggccctgggacacagggcagagggtgtctgaaagaggagggcagacacctcccgagaagccctgggactcaggaacccggcttgtgcctgtgggaagagagggctggagctccaccaccactggctgtcacgagctccacacaagaacagaggaaagttcttgaagagctgttgaatcatgaagggttattaaacaattgcagccttcgccacacatcaaatccaagaccagagccccaacacctccaactggcaggaagagtgtttattttccagaagcctcctgacctgtgtgtggttaaagctactcagagatgtttaccaagggtgctctggggattagctaagtgctcgtaaccaggaggagccgtgccaagtattattacggcctaagaataactcccgacagtccattctgaaacccgcacttcaccaactacaaagtggaaggcattcagaggcctcaggagcctcagctcggagatgacacggcagtgacagttccaactgcagtccaagctgtgacatctgctgctgaacacgcgggcttcagctgcgaagccttttaaattctaactggtgggttttcaaggggaagaaagtctttttgttctatctgcagctgaattttgactcaagcccagctgcacgcagagcagcagagggctgtggggagtccggcctactgctttccttccgaggcgagagcagctccagcccaagccacagctattttggggctaatagcagatgttggggctctagctgaagcccaaagtgccagtttcaccgagtctgaaaaactggagacccagaggactccgaggtggaaaatgaatgaaacagcaacagccatcaaactaattagcaaacaagacacctcaagctttcaaagaatagaaatccacagggcctaggaccacagtccaaaactgctgaggctggggctccagccagagccctgcggaaggcagggaacacaacccaagcgacacaggctgtctctgcagggcttgttttgcgaaaagtatgcagaaataggaataaaatacattagacagcaaaacctcagtgctacaaaccaaaggacaatcagcattcacaactgcaaagtcacaagggcaacagggcgtcatgtcagccggacttttctggctgatgcaacacaattgtgtggaaaggtggggtcgccaggttgggagagatgcatggccccagaacacgggaggagcagctggtgttttcctgaagacaggggactaatgccatgctgtgcagtacccggccctgggtcaggttctgcaggagccacctgcctgaggctgcacctgctgcacctgctgcacccagcctgaggccactaagctggagctcagactctctggtcccaagatcagaggaaccccaagtcaggggattcacatggggcaccagtccctctcaccaagagcctgggccgctccgtgacaccctggccacatggcagacgatgccactcacactcttcccagcagacagaggaaaggtcactcttaccccatggaaagggacccaggcaaggtgtggtttcaggcctggctgctccaccactactctccagccccatccataagcccaaaggcccacgcagcagcaaaccctcgtcacgctgtgactcccacagggagcaaccactttcctacggggatgtgggtcccacacactgcctgtgcaggacaggggtgcaggaggcatctgcttctccacgtcactgcctcaaaacctcccacaacgggagccacattcccacctcaggtcctctgcacagccctcttccacaacaccgcacccctagatgcctgcgtggcctgccccctcttcacttgtttgagtcttcaatggaatgtcacctgagccctggctcctggccgctcctcctggtgctctcctccttcacagaacaccaccagctgagatcctgcatctttctacctgcttatttagtgtctttccccctccactggaatgcaggctccagaaaggcatgggactgttttttattttgttctgtttttttccactggcccaataatacgttttcaataaatactaagagaatgagcaaaaaaaatcatatcattccagaacagtaactatccgactaaatgctacgcaagtcattctactgaactcagaccactggattaaaagttcggtataacaggttaaatgtcgtagtctatccatacaatggaacttgtgtaagaggaaaaaaacacatcttttcctatattaacatgaaagatcaccaaaaaggcagtgctaaatacagacacaagaagcggactataagtatgctatgctgccgtgtgcagaaaagtcaaaacctgcatggctgtgttgattcatttttgcacaaaagaagtctggccaggcgcagtggctcatgcctgtaatcccagcactttgggaggcagaggtgggtagatcacttgagcccaggaatttcagaccagcctaggcaacatggtaaaaccccgtctctgcaaaaaaaatacaaaaaattagccaggcctggtggggagtgcctatagtcccagctactcaggatgctgaggcgggaggatctcttgagcctgggaggcagaggctacagtgagctatgatcgcgcacggcactccagcctgggtgacagacagaatgataccctgtctcaaaaaaaaaaaaaaaatctaaaagataaacaagaaaataacaatggcctcctgctggagaacaagaacatggcaggaggcttgccactggatcctatttttttttttttttttttttgagacagagtctcactctgtggcccaggctggagtgcagtggcgcaatcttggctcactgaaagctccgcctcctgggttcacaccattctcctgcctcagactcccgaggggctgggactacaggcgcccaccaccatgcccagctaatttttctgtacttttagtaaagacggggtttcactgtgttagccaggatggtctcgatctcctgaccttgtgatctgcccgcttcggcctcccaaagtgctgggattacaggcgtgagccaccgcccccggcctatttttttttcttttttgagacagaggctcgctctgtcgcccaggctggagtgcagtgacatgacctcagctcactggaatctccgctctcctgcctcagcctccagagtagctgggattacaggtacccactaccatgccgggctagccactggatactttttgaatgttttcaatattctgtaccaagaaaatacaatagctgttcaataagtaattttcaaagcctagtattgcaaccttatattgcagaatcaggtactacataaaaattttataaaaagaaaaataattcccacaacaaattaatgcagagaaaatctaattataaacatttgtaacaaaacaattctatcattcctaactgacgctcagctatgcataacaatgcaaataactggcactataaatggggcagcaatatatcactgcaaggtttcctacccagaatcatcaagacgataatggagcccctgcccctccccctccctctcccctttgcacggtctccctctgatgccgagccgaggctggactgtactgccgccatctcgactcactgcaacctccctgcctgattctcctgcctcagcctgctgagtgcctgagattgcaggcgcgcgccgccaagcctgactggttttcgtattttttggtggagacggggtttcgctgtgctggccaggctggtctcagctcctgaccgcgagtgatctgccagcctcggcctcccgcggtgccgggattgcagacggagtctcactcactcagtgctcagtgttgcccagcctggagtgcagtggcgtgatctcggctcgctacaaccttcacctcccagccgcctgacttggcctcccaaagtgccgagattgcagcctctgcccagccgccaccccatctaggaagtgaggagcgtctctgaccggccgcccatcgtgtgggatgtgaggagcccctctgcccgaccgcccagtctgggaagtgaggagcgcctcttcccggccgacatcccgtctaggaagtgaggagcgtctctgcccggccgcccatcgtctgggatgtggggagcgcctctgccccgccgccccgtctgggatgtgaagagcgcctctgcctggccgcgaccccatctgggaactgaggagtgcctctgccccaccgccaccccgtctgggaggtgaggagcatctctgaccggccgccctgtctgggaagtgaggagcccctctgcccagcagccgccctgtccgggaggtggggggcagcccccgcccgccagccagcccgtccgggaggtggggggcagcccccacccggccagccaccccgtccgggaggtggggggcggcccccgcccatccgggaggtggggggcggcccctgcccatccacccggccgccccgtctgggaagtgaggagcccctctgcccggccaccaccccgtctgggaggtgtatccaacagctcattgagaacgggccatgatgaggatggcggttttgtcgaatagaaaagggggaaatgtggggaaaagaaagagagatcagattgttactgtgtctgtgtagaaagaagtagacatgggagactccattttgttctgtactaagaaaaattcttctgccttgggatgctgttaatctataaccttacccccaaccctgtgctctctgaaacatgtgctgtgtccactcagggttaaatggattaagggcggtgcaggatgtgctttgttaaacagatgcttgaaggcagcatgctggttaagagtcatcaccactccctaatctcaagtacccagggacacaaacactgcggaaggccgcagggacctctgcctaggaaaaccagagacctttgttcacgtgtttatctgctgaccttccctccactattgtcctatgaccctgccaaatccccctctccgagaaacacccaagaatgatcaataaatactaaaaaaaaaaacaaacaaaaaaccaacttaaaggggtaaatgatatcttaaaaaaaatccattaaaagaggaaaacacaaagaataaaaataaagttatctataatccaccactcacaaaaaaaaaaaaaaaaaacgtaatggatcccagaagttggctaagtgaggaatcaaatgatgcgtgtatctcaaacatttcaacttaaaacagaaaaacacacaattatctttcaagctgcaaactttttcttcgaacatgagtccattaattggagtttcatctttttttttttttttgcatgaaccatgtccacgacacaccgctcatgattgttagctttgtttctttaaagtggatccctgtcatcttcccagaccttacaacttttcctcataatctttcactatttgctttattcaatagcaattttttagcaattttcctttgggactttccaaagcattcagctttgtcttcacagaaacattgctctacacataattatttttcatcagcttccatatttaattaaatgatgtaattacaatgacgtgcaacaggcacaaaccggcacattaaggatgggcggccaaggcctccagggagcaggactgagtgagcaccacagtgtttacaaaactcaggagtgatcacagagcccaggggcttgctctgggagtgtgggttgggggcgtaatgggatggaactagggaaggtccacatgttttcaaagaaactttcctttttcttgagaatgggcacacaggcgacagtatgtattctttgttttttgttttttgagacagagtctcactctgtcgcccaggctggagtgcagtggcacaatctcggctcactgcaacctctgcccccccggttcaagcgattcttctgcctcagcctccagagtagctgggattacaggcgcatgacaccacacctggctaattttttgtatctttagtagagacagggtttcactatgttggccaggctggtctccaactcctgacctcatgatccgcccgccttggcctcccaaagtgctgagattacaggcgtgagccacagaagcacacttttctacgtataatgcattttaaacttggtcatgagagttgctgtgcagcaggaatcgacactctcctaggcaagcctggggagcactggacgccctggaggcagcctgggcctggctcctctcagagctgccccctcctcaccatgcgaatctgacacaaagcatctccctcatccatgccaagaattactgggaacagaaacgtgcatgtaaatagtcttgttttcaaaaagcaggttctgcaaaccatcccaagcataaagaggcagcagagttaacaccttagtgtctgcagtcagtcaagcactcaattctaagtccattcattgcgaatctgtgactctgagctctccaaacctcaaccccccacctcaggaaaatgggaacagttacagtccagcatggactcactgagaagcggatgcatgcagacacctatgtcctcttctcaataggttacttgtataacgaaccgctgtataaacagagactacaagatcagaaataaatatttctctatccactggcctctttccagaggagacataaggtgattctaacatcctcaggcactgttccagagtgccgactgatgcaaaggaatgggagaggcaagagaacagcctggcacagcagaaagcccgcactctggaggcagccaggtgaagggcccagctgagcctcagttttctggtctatgaaacagacaattcgaccctcctgcaggagctctgcgctgagggcacccggcagtcagtggaaaaccctggacccctgtgacggttgctggtgcccacgcccatcgcccgagcaggggcagacggcatgcctatcaggttgtaggtcacatcaaatggagacagcagatatgttaagtgacagaatcagagtctaaaaccacactaagaagcaggaaaaatggggggggggggggttgcgggtggtagaggaaaaataaattttttgacagttgcaccaaaaaaaaatcaattgtagaaacatatggtggtagggcacacctgctccatcagcataatctgtgaagatgcctgcagaatctgcatccagtgaacaaatttaactgagcacctgctgtgtgcccagcaaggacactacatggacaaacagacagagtccttggcagctagagctgagtggctcgctaaggaggccgaccatgacaagagtgggcaggtgacatccccaaggcccagaggaggtgacagtggcttgatccagtggccggatctggagaagagtggaaagcctgaggctgagggaagggggcatgttgacccgggagggccaggaaagggctctagctagggaaaggtgacacctgagcacagattcaacgaaacaaaaggtgggcaatacaaatacggctgggcgcagtggctcacgcctgtcatcccagctattctggaggttgaggcaggagaatcgcctcaacccgggaggtggaggttgcagtgagccgagatcgcaccattgcactccagcctgggcgacaaagtgagactccatctcaaaaaaaaaaagaaaaagaaaaaaaatagaaagggaagaatttataggaagttctacaacaaacaaggctaagctacagctgccggggatgaagggctggactggggggaccccgggaactctggactgatagaagtgtgttatctggacgagtgcacatgttccacttgtcatgactcatccaacaacacacctcaatctgtacacttcagtgtccaggctcaggggatgcctgagccgtcagcatgaacccacggtcacactctgggatgcgagccaccatgggaggatgctgctgcctgccgcactccagccaccaggaccaccctctgcagagcgggaagaagcagccgtgcacagcagggagctgaaatggggaaacgtggtccaggggagaggggactctgcgccgtgtttcactaaaccaaggtggtgtccacggcacgaaacgaccaaaacacgcgtctcagctcaacagaatggaaggggtgggacaagtgggtgctttgctaggtggcagactccccatccccaagaggtacagggaaagactgacgggcaaggtggctggaggctcagggcgagacagagtgcccctgaggaccacggtggggcttggagcaacatggccatggctggatggccaccccatgctgcccacagccccgctgacaaaggcaggtctgtgtacgcagaatgaccggcccccagggtacacctgtgcctggaactccagtgtggttactgtgggtccacatgctctgcgaaagaggaagtaagtcctggggtccatactgatgaacgtcttagagctattagggtcactcattaagtgacttcagtaaaaccacacgttctcccatgtggaaacttctgacaagaacaggccgccagcagcaaagtccacgccaccacgactgtgacgtggtccatccagacctcgcctcccaggaggggatcccgccgcagccctggacccaggccatgttttacagctcttttgccagaaactggcccccatctctctgagctgtccacaagtcagcaacttggctcaactgctgcagggacatgagttacaagggtccccagacacatgtaaataaaatgaagaaatgccggctttacagttgctgccctcgcactctttctcccagctcaggaaggatctcaagggcttcaaagcagcctgggttccaattaagcccgtgtgaccaccccagggatgccagaacattcctgattaacaagaggcgctgtttgaactgttcaagctaaaaaaaagccctcagaacctttcaaacaaatgccataattttctctccctgtttcctcactctttggaaaagctgatcttttgaatgctttaaacgttcaaaaagaaagctagataatggccccaaacacaacttcggcaagaagctcagaacaggggcagcaagtggagagcttgggatgcaaccacacacaagcaggcccgcttccgggaggcgtggcccggccggcctgaggctgtgacagcgtgtgtccactgtccacagcagctgggccgggagaatgacctgggcggaaccacgcctggcagggagctgcagggcctccatcatcatgccaggcgaacccagtgacaagggcctcaaacagaagaggcccagggaagggcagcccatgggcctgagaagcaccactacacacctgggcggcgcactccgctcacaaagcactcttccaggaagggccccgggctgctggagactgaaccggaatctgcctaactggtggaatccccttttacaaagaagtgcctgtagctcacggggctagaacccaggaaggccccaggtgagctcgaaaccctaaagcaaccccgctgtggacagtggcatcgcagataggagagtgccggtgaaacagtaagaccagggcagcatgcttcactgggcaacggaggtgctgctgcaagtgggcgcagtagcaggcaggtcagggaaaaccaagggactatgacttcagagataacaggtgacattcctgactgttctacctttagtcatgattagcaggccgggcgcggcagctcatgcctgtaatcccagcactttgggaggctgaggcgggcggatcacgagctcaggagatagagaccatcctggctaacacggtgaaaccccgtctctactaaaaatacaaaaaaaattagccgggcatggtggcgggcgcctgtagtcccagctactcgggaggctgaggcaggagaatggcgtgaacccgggaggcggagcttgcagtgagccgagatcacgccactgcactccagcctgggcaacagagcgagactccgtctcaaaaaataataataataataataataattaaaattagccgtgcatggtggtgggcacctgtaatccagctactcaggaggctgaggtgggaggaccacttgagcccgggagttcgaggcagtagtgagctatgatcacatcactgcactccaacctgggcaacctcatctcttaaaaaaattaaaaaaaaaaacacaatattttagaccaggcatgatggtgtatgcctgtaatcccagcactttgggaggccaaggcaggaggatcgtgtaagccaggagtttgataccagccagggcaacatggcaagactctgcctcttaaaacaaaaattttttaagaagcaaaataaccattctgtaataaatttcacactccccaccgcacctatcttacctgcaaagatttattttggcaaagaggcagcagattgcagagtaaagaacagtaaattggacgggcatggtggctcacgcctgtaatcccagcactttgggaggccgaggcgggtggatcacttgaggtcaggagttcaagaacagcctggccaacatggcgaaaccccatctctactaaaaatacaaaaattagccaggcgtggtggtgggtgcctgtagtcccagctactcgggaggctgaggcaggagaatggcttgaacccaggaggcagaggttgcagtgagccgagatcgtgccactgcactccaacctgggtgacagagcgagactgtctaaaaaaagaaaaaaaaagaacagtgaattgaaaatcaagtaaatctggcttctagagaaacaatcaaaggcaatgtgggaacaaaggactttaacgaacagaaactcagaaaaaggtgcatcattagcgagatgttctttgaacttgctgagcaataaagggagagaaaaggcctcagaactctagaaaggcaacagccatgcacctgcaggcctgggctgtggccccagctggtccctggcctgctgtgtggcctgggctttcctgaacttcagttatctgtccttaaaagggaggaagggaccaggagacctcatcctgatctgtgattctccttcagcaaacaaaaatcgcctaagaatctcttccttctgatgatgtggctggtgtgggtgaaccagccgcgagaaggcacaggacgatactcccgcgtggagggcgccacgaggtcaaggtcctgaggccggaacaccaaggagctctgggagggtggaggaagaacacaagcctggagcagggggcagacacacggggcgtggggcccagaggccaccgggaggactcaggttttattccgagtgtgctaaggagccagggattgtggctgaagcgggaggaacacgctaaggagccagggatggcggctgaagcgggaggaacacgcgctcggacttgctgatgggctcttacgtgggcttttccccagctgaagaatgagttactaaatgtgttttaaaatgcaaaaatgtgtacccggtgcttgtcctggcgctgttcagaacaggaagaaccggaaacaacctgaatattcacaggaggcaaacgatccgtgacaggacaagcgtgggatggcctcctgtgtggcagaaaggacattcgggacctatgacgcaaacgcaggcggctacacattcgcctgcaggactgcaccttttaaagtccgcatgtagacagtgaaaatctacaaaggtaaaccggaatctcctaagagcgggtagggatgcgactggtgggattacgggggattggcagtcttctttttatgtatctgtatttccctactttgtaaagaacattacttgtgcaataaaattaagaaaaaaagttctatagccaccttgctcaacttcgtcatgtcaaggaaaaaaagtatttaggaacataaattgttctttacttggaaaaaaaaaatctcttgctccaatccaaaaaggcataggaaaaaaggcataaagagctgtgcacattagcaaaggggccctcttgcactgagcggtggccagtgtgtctacactgcaggtgccaggctccgcgctgcgtgcaattaacaggtcaggtgcatggagtttaaaggagagcagaacaagcagcgggtcaaggtgccaggactgagatcacaaagacccacagggggcacatggagcagaggctggaccacagtctgggtggaggggtcggccaggactgagagcacaaaggcccactgggggcactcggagcaggggctggaccacagtctgggtggaggggtcggccaggactgagagcacaaaggcccactgggggcactcggagcaggggctggaccacagtctgggtggaggggtcggccaggactgagagcacaaaggcccaccgggggcacttggagcaggggctggaccacagtctgggtggaggggttgcggaaggcttcctgagacgagacaggatgcagataaaccctaaatgatgaatgcatccgaaggggccctgcctcccggactcgtgccctcaggtcgtcccttccacaaacacccgggccaggctctggccacagctactgcaaccacaaccaacaggcttaaggaacctgcatgccagggcttgtccctatgggctttggcagccacgtgaagcagctcgtcctagccagagagagcccctgaggaaagaaggcagccctgcctcctggccattaacaaggcagcacacgtgcacataaagccatcctggatgtcccatccccaactgccaccagattggccccaggcaacctgcagaatcctgaaaaattaccaagcactgttcaaagccactaagtgttcggggctggagtgggccgtaacagggaaaggggagggcaagtgggagggcagagggagtgggagaaagcacagaactcatgttcggtgtggctggtgcagaggctgaggcgagggtgacagagaagcgggagagccaggcaatggcaggaggcttctggtcagccacatggagacatgaggacttcatcgtgacatcggcagggacagacaaacagctttgagcagggtctcgtggtcattgcttcatctcaggcagatccctccaagtgctggagtgaagaatagttgcaagacgcaaaagtgaagccagggacggtaaggtggccactgcacgagaaagggtttccaagtggcgtagcggcagtggggatgggctggaactagcaggatcccaggaaggcaaggagaggaaatcacaggaaaggcgacacaggctgagaagggaaagtcggggcgtcagagatgagaaccaggtgcctgccgtgggtactgagtggatgggcctgcctctcccaaggatgggaaccggaggagccccaagctccctgtgaccagttaaacacaggcagaaacacatggggggttggcggttataggtgatcaaacgcaaaacaacttctggccttcaacagttcaaagagcacagttggaacacagatgatttagcaagacaggcagaactcgatagtgcttcaaaacggcccaattttccttgctgctacgccactggtggctgccattaatgaatggggtagaaaagagaactggggagaactttcagagaatcctaataatctgctgaagagaagcaacgtttcctgcgtatcgtgccagcagagcgaagggcactctcattctccccaatttaaagatgaaaacatgggtgcagttccataacctgcctgaggccacacaaccaaaggaggcagcaggcctcaacctaggctcttacccagtaggctcacaggactgtcaacactgtggtgctggagccacagcatgcacacacgtgcacacatgccccacaaagattcctcaacctcacccccggaagtgcttggcggattacagcagggccacgtatgggtcacctccaccctgcaaaggacagcagagaaggacagcagccggagggtggagatgggacacgtatgggtcacctccaccgtgcaaaggacagcagagaaggacagcagagaagcccagcagctggagggtggagatgggccacgtatgggtcacctccaccaggcaaaggacagcagagaagcccagcagctggagggtggagatgggacacgtatagtcacctccgccatgcaaagtacagcagaaaagtccagcagctggagggtggagatgggacacatatgggtcacctccgccatgcaaagggcagcagagaagcccagcagttggagggtggagctgctgtgttcctgaggcctcaccgtgcccagtaagagggcaccatgcaggctgccaaaggggccatgagaccacgcagcccaagaccagacccgtaagagatgccagaaatcagccacatctggagggtccctgggatagacacacaagctcatcaccacgaggcctaagtctgatgggaagagcacacggcaatgcaacactgctgtgtgggttcagatcccagccactcatcggctgtgagtcctcaggacagctgctaacctctcctgcctgtacttcctcactcataaaatgagtatgacaacagtgcccccacctcaaagggtggcagggaggactgctggagtgaaggcccaggaagtgcttggagcagcacctggaaagggcctggtgagtgttctctgccattattcctcaccacacagctttcattcttcacagccttgcgagacaccacgacccttcccattcaacagacaagcacacgaggctcgggtgggacgtgtctggcccaagattacaccgctgggaagctgcagaatcccatgtgaaccccagactccaactctcgtctgactctcgcccctgcaggcctcgactccacacagggcccagggcccagcagcaggaagtcacggtgccgctgcgaaaggccccgggtctccagagaacatccacgcctcctcaggacaaagggctcctctgggaaaaggcacaaacactgcctgcaccgtgtgcttcccagaacagaaaacgggagggcgccgccgccaggacggggcagcccaggcgcagccactcgccaccttggccggctcaacttcccagcagcatccagcaaagccgtcagtagtcctcgtggtgccagctcgagtgcctgatgggccctcgcacgggtctccgtgggacagaggtaagggatagaggaccgaggccctaaccagctgagaacccacgtggctggccgcagtcccatcccagccctgctggctgccaggtcaaggctggagccccagatgggctcccgtggggcgaagtcagaagtcagaggtgctcgaggctgccccatcagatggctcctgggagcgtgcacaccgcggtctgtgcgcacagaagaccccagacggtgccaggcaccctgcacacatgcctctggctgagactacagcacctgctagcatgcccctggcattcccagtcgaatctccttttcttccatgtatacgtattcctcgtgaagttacataaacaaagtgtacatagtcaaactacaaggcttgttatggcaagcagccatccccaactccactctgcatctcctggcccagttcccagcctcagaagcaaacactctaagttatttgagtcaattatgttgaaacggacctcccttcctctagacgataggctttcattgccactttcctaattcttcagtttggggcattacctgtgacttctcaggatggaagaggaggccatggctctgtgctcccaccacccctctgccgccccgcaggtaccaccatcaccacagctctagctgccccgcgtctggctgagccccgcgtctagctgagcacagctgggtgctcaaccactcacactgaggccacaaaggaaaccatggtgacttccaactccttcctactttgtgcttcccctcaagctaacaggagaaggggtttttcacttgcttagctgtctgtttatcgctcattccaccctggctctttaaactgttcaaatctcctctggagatgtccatgctcacccggcatcgggctgcctggcaatctcgtctttggggagactttctcggcaccacttcctgctctgaggactgagcaccatctgcccgggcacaggcatcatcttcagctgcttctcccccagtgacggatatcctgctccctgcgttccaatccttcctcagtcatcagtctctctcttccttagtacaatgcaccctccagtagctttctgaaaaaagatttgagggagataatttgtttttaagatagggtctcactctgccacccaggctggggtgcagtggtatggtcatagctcactgtggcctccacctcgtgggctcaagcgatcctcctgcctcagccctccgtaccctgagtacctaggactacaagcaggccagcacacccagctgctgctgctattgttgctgttgttggacagatggggtctcactctcctataccattacccataatggtctccaactcctgcgctcaagtgatcctcccacctcagccactgaaagtgctgggattacaggtatgaagcaccatgcctggccaggatgactgacttttttaaagactttgcaaatctccattgtgcctttagtctgctctctcatgcgactgttagtttcactgggtatagaatcaaaggctgaaaattattttcctgcaactctagaccacattgctttactgtgcactaaattccaatgctgctgtctagaagcacaaagccatcctgattcccgcttcgtatgtaacctattctcatccttctgaaggtgtgtaggatgctgtctttaccctgatatttggggtccagcaacatgccatggcaatggtctttgatcacagacgttcatccactggactgggtacttggtggctccttcagtctagaagaggatgacgctcaagagagggtttttcaattgtttcattatgctgtcctccccgccgtttctttgcggtacttgttgaatgtggtccacagaacccgatcctcagagtgtattccgtttctcctgtttgatcttttttttctttccggatctccttaacttttccaacacttacactgattttttccccatatctgttcatgtagttttaacttcccagaactcttcttgttcactgaatgtgcttcttccagaggacatttttcttgtttcattatcttctcttgttaaaataaccacttttatctcactgaggatgcttatgagaggtttcttcctggaagttttatccttgcataatttccatttcctctacactgtttttctgtttgcttggtctataccttttacatcagagactccttcagatgtctaggaggctctgaatgagcgactgtgacggccacctgtaagtttcacggcaacagagttgtgaggtggcgacttcagtacctttctgtcctccctctggatagtctcagtccccacaggaggcccttctactcttgcttagtggacaacgctccaccagcccagactcaatgctgagtggggacaaagctggtcatctcggcggtcacacagagttcacttaccgtagtccataaggcaccccgtcccgaaaagcgccaagtgcacgaccatcggctttaccgcctgctcagcacgcctaatgcccgccccggctgcactgggctgagcaaggaccagggcctctgagcagccggctcacaacacactcttatgtcctcgtgtggccactctggaagtaagcagtcacagctcccaagcgtggtcaaaactctgcagcacagatcaagctagctctcagctttccccactcccaaattagcatttggttttctcaagtcagctaagtccatcaccaactctccaattacattccagcttctgaaataggaatgctatgactttactttctccttattcacatgaacctttgccaaaaaaaaaaaaaaaaaaaaaaaacccaccacacttctcactgcagtatgaggtttcagaaagaaaaaggtaggtgtatgtattcaatctaccatcctctccatcccccaaactggtcctagaaaaactctggcaacatacttttctattttaccagtaagccacattcctcaggcttgttgaatgactgccaaagtaggagccatgtgcagcccaacagagctcaggcattcccaccacagaaagggtggggctcatcctcctcctgaagccctggtcccttccgtccaggccatcccacacaatcacccaggaagttttgtaagcatgcaaaataaacccaaagacaggaaataaagattaaaaacagatggaaaaactacaacggtgagaaatcaaccaagtcaaaaatcagttactttaaaaggctaataaagttgcagacatctgaagatattaagagagaagagaaaaagcacaaataaccaaaatcaggcaggaaaaaaggactatcatcagccatcctgtctgcattgtacattttctttaattaaatacgagtctaaggatgagtctgggtgcggtggctcacacctgtaatctcagcactttgggaggccaaggtgagtggatcacttgagattgggagttcaagaccagcctggccaacatgccaaaacctcgtcactactgaaaatacaaaaattagctgggcatggtggcacatgcctgtaatcccagctactacggaagccgaggcaggaaaatcactggaacctgggaggcagaggtttcagtgaaccgagattccaccactgcactccagactgggtgaagagtgagactccgtctccaggaaaaaaataaataaataaaagagtgaaatattgaacattttcccccagatcaaaaataagaacaagctatctgctaccaccactgctatttcacgtcgtaccagaggtcccggccaatgtaataatgtgataaaaaagaaacaaaaggtataaagctcaagaggaaggagtaacattgtctttatttgcaaatagcactatttttatacaaaaaaagcctaaggaatcttaaaaaaaaaaatttactggcactaagactgaattcagcaaagtcacaggacactgtcaaaacactaaaactatactgtctctatacacgagaatccagcaaagtcacaggacactgtcaacatagtaaactatactgtctctatacacgagaatccagcaaagtcacaggacactgtcaacatagtaaactatactgtgtctatacaataacagcaaatattggaaaggtgacagtcttcaaaattctactcaaattatcatcaataatacaaaattcttaggattaaatttatcaaaagataggcaagagctcctctaaaaaacatacgctagtaataactgtttgcttggtgagctgtgtggccagggttgtgaaatcagaagagacacccagccttctccaggtgaactgtgaatcgctaatatgttattaaaagacgtatttcagaaatggtgcgcttcagtggaaatccctggagatctgtcaatgccttcacattccataatatgttttaatgtcaggagaaacacagaccaaaatgcttatgaaatagtctggtcaagtttttctgtatccgagtccttcaagtgctctccctgatatcaggcagtaacaacatagtgttacagccacaatttcaatgacctaaaatgattagccacattacttctttaatttgaatctggcactttctaggccactggttctcaagtggcctagtgctatgcattcatgtacagcagatgtattcatgaggttttatgaaattaaaaatggttcactctatctcagacttacccagtctcttcatttgatatgctttggtatattccgggaatattttgtctcaacattgtacatctcaagactgttttcttcataaaaattatgttcacccatttcaatgaatcagatgttaacatccactgacttctttgaaacaggctgaattattatccttagtaatattttgtctaattttttaatcgcctttttatctttgttttggatgccacagaaacaacccaatttcctcattagttgcattactattaaaaccacatcagacatttcatgtttgaaaattatataaaacctcatcaggcatttcacacttaaaaattatcagtaagaaattaaccattgccatcaagtctttgtcatctgtgaaaagtttctgctcgactctgtaaacgcctgcctgaaagctcgggataaactcacaggccagagtttgcatcttcaacaagaagggcagtctcagtggctctggagaaggactgcagccgacatcgccatgactgacacctgtggggacaggctctggaggcaagagcaacccttacaccactttcaaacacaccaggaggttaagtccacatttccaaattcactttaggcaagaagcaatggtttcatgagtttataaaccctagatctaacaggataagaattaattacacagaactaaatgaactgaagagggaagttttactgaggttatttgtggatgctggttttatgttctattttctggatacaaggggaagtcattgccttttcttcttaagctatttaacctacaacaatttgttgaactcagctttgataaaaacgaaatattttcaaatgatctttgaccttcactggtatcccagaattcagaaactcttactgagtctccttaattttcacagcagtaggttcaataagaacctttcctcctttttaacgtgatagaattggacaaaccgtacaaccagtgccttacctgcgtgtcatctgagaacaatgctcattcaataaagcatgacaaactactctgaagggtcaaagatggcggtgcacatgcagccaacagcaacaaaactctcccatcttccagatggttaagaccacttgctggaaagacaggaacctcaggatactgggaggacctcaagaagaggggaattcacccaaatgtacaggtagaaaacataaaataaatttgcaaccatgaaatggaacagttcttaaaacacagaaattaggctgggcacgatggctcacgcctgtaatcctaggactctgggaggccaaggcgggcagatcacctgaggtcagaagttcgagacaagcctggccaacatggcgaaaccctgtctctactaaaaatacaaaaattagccgggtgtggtggcgggcgcctgtaatcccagctacctgggaggctgaggcaggagaatcacctgaacccaggagacggaggttgcagtgagctgagatcacatcactgcacttcagcctaggcgacacagagtctcaaaaaaaaaaaaaagaaaagaaaagaaaaactactatcacaaaagaaaaaattgatgaattggatttcatcaaaatcaaaaatttttactcatccaaaacaccattaagatctcagtaaaaatgtcagagtaagagcctatggaagttcactccaccataaaagcaacagaagagtgactaaaacggtcagaatcagatttttgaactctgaaaactaaccaaaggcttacagcaatccgggaacgtttggtcaagaaaatcaggtggctctcaagaagagtgcgcctggggcattttaactcaccctggtcccagcccccacaccacaactccatggtggccttgaaaaatcagtctagaccgggcacggtggctcatgcctgtaatcccagcactttgggaggccgaggcacatggaccacaaggtcaggaatttgagaccagcctgaccaacatggtaaaaccccgtctctactaaaaatataaaaattagccgggcatggtggcgcatgcctgtaatcccagccactcaggaggctgaggcaggagaatcacttgaacccgggaggtagaggttgcagtgagccaagatcgcgccattgcactccagcctgggcgacaacagcgagactctgtctcaaaaaaaaaaaaaaaagaaaaatcgcactctacattcccaggacagagggaacagaatggggctggcatctctcaaaataccattcccaaagaagagttattacttgacccatctgggtcacttactaccttaagatcccaattaaaagtcctgtcttaggccgagcatggtggctcacgcctgtaatcccagcactttgggaggccaaggtgggtggatcacctgaggtcaggagtttgagaccagcctggccaacatggtgaaacctcatccctactaaaaatacaaaaaattagctgggcgtggtggcaggcacctgtaattccagctactcgggaggctgaggcaagagaatcgcttgaacctgggaggcggaggtcacagtgagccaagatcgtgccactgcactccagactgggcaacaagagcaaaactccgtctcaaaaaaaaaaagaaaagaaaagaaagaaagtcctgtcttgatttcacctcccctaatctctcccagggcaaaaacttggttggggaatgagtctgtcaaccacttcaacatcacaaatgcctgagtgacagcagtggcaaacaaaagactcaccagaacgctgacacagaaaagctaagaaatgagctgtccatggggactgagattctaaggggccatgtccgtgcatgttgcgcacaggctcggaaaggcctgtgaaggccctgggttctccctcctgctcaccttgaagctctgagcaagcaggaaatgagggcaaaggcagagtggccaccacctggcccagcgtgcaccggagctcctcatcaaggactcaccagttctaggtatctcaggaaatctctggctaatattcattctgagactggcctttgcttaagaccgagcatctagcctaaagcatgccgaacttccagacaagcattagaggcaaacaaaaaactgtccacagatcacagagacttgatggccatggttaatttacgactgagagttttcaaatgtgaaatgtctagtgaggttttgtaataaaaatagtgcaactgtcaaggaaactgggcttgtttctgtagcatctgaaacaaagcaaaatgccaatgagaaaattagacaaaatatctctggggataataattgttgtcagattgttcactgctaacgtataatattaaacattatcttatattaaatataatattaaatattgatcttgtatcctgcaactctgttgaacttgtttattagctctaataattttgtaaatgtgtattctttcagttttttaatgtataaaatcatgtcttctgcaaatagagacagttttcttcttcctttccaatctggatgtcttctatttcctctccttgcataaacgtcctgggtagagcctccagcacaatgctgaacagaagtggagaaagcacgtatcctgtcttcatttttcttctctctctgctttattccccttaccggagaatcctgacggacctatcttcaggtttgctgattctttcttctgctgctcaaatatgccggtgagcttatctaccaaattttcatttcagttgctgtacttttcatctgtagaatttctatgtggtttctccttatagtttctttttattgatattctgcttctactgattgattgctttctccaccatgtatgaattatactttcttgcttcttgcatgtcttccgaattttgcggcaactctggaatcagattctctgcccttgccagggctggctgctggtgctgccagctgtagttgttttttacttgtttcatgacttttctgaactaattctgtaatgtttgtgtctctgttctatgcagccactgacgtttccacacgttagccatgagaaatacaaattaaaaagcacataagatttaaaaaatgctaaatatcattaattatcagggaaatgcaaatcaaaaccacagtgagataccaccttaatcctgccagaatggccataatttaaaagtcaaaaaataacagatgttggcgtggatgtggtggaaaaaggaacacttttacattgctcgtgggaatggaaactagtacaatcactacagaaaacagtacaaagattccttcgagaactgaaagtagagctaccgtttgagacagcaatcctacagaggaaaagaagtcattctacgaaaaagacacgtgcacacgcatgttcacagcagcacaatttgcaactgcaaagatacggaaccagcctaaatgcccatcaaccgagtggataaagaaaatgtggtctctatatatatatatatatcatagaatactactcagccataaaaaggaatgaaataatggcatttgcagcaacgtggatggagttggagaccattcttctaagcgaagaaactcaggaatggaaaaaccagacatctcacatcctcacttataagtggaagctaagctataaggacacaaaggtgtaagagggatataatggactctggggacagtgtacactgctcaggtgacaggtgcaccaaaatctcagaaaccacaactaaagagcttttccatgcaatcaaacaccacgttccccaaaaactattgaaataaaaaataaaatcccattaaaaaaataaactactactgatataaacaatgaagatcataaaatgtaactggaaataattttttgtcccacaataagtcattgtttaaattatggtatatccatccaatgaaaaatcatgcagtcattaaaaaaaaaaatccactttaagataccactccacacccacgaggctaaccataagaaaaaagacatcataataagggttaaaaattcagagaaaccggaatcttcatatactgctggtgggaatgtaaaatggtgtagttactatggaaaatagtttggcaattcctaaaaaagaaagagctaccatgtaacccagtgtttccactcaagagaagtgaaaaaaaaaggtctcatacaaatatctgtacttgaatgttcgtaatagccagaaagtgaaacaacccaaatgtctacagctgatgaatgggtcactgaaatgagctctgatgacacaatggggtatgaccacgtgccatgtggtggaagggagcgctgatccgtgccacagggtagacgccccttgagaacgtgctgagaggaaagcgccagcacagaggccacctatggtgcgattccactgatacacaacgtccagaacaggtaaacccagagacaaagagcagaggagtgactgccaggggctggggaaaggagaacagggaacttcggccaactgggcttcctttggggaccatgacaatcttctggaattagacagtaggtatgagtgtacaaccttacaaatatactaaaaaccaccaaattaaacactttaaaacagacaagcggcagggcatggtggctcacgcttataatcccagccctctgagaggccagtgtgggagaaccacttgaggtcacaagttcaagtccagtctggacaacatagtgagaccctatctctacaaaagagaaaaaattagccaggtgtggtggctcacacctgtattccaagctactcaggaagctggatcacttgagcccaggagttagaggctgctgtgaactatgatcgcgccactgcatcctggcctgggtgacagagcaagactctgcctcaaaaaaaaaaaaaagaacaacagtcagtcttacagtagtagtcatgtatattttaataatttaaaaactaaagaaaatgacaagccacagacagggcaaaaatgttgacaagacatacactggatgaaaaacttgtatccagaataaagaacttggaaaaatcaataatagaaagaaagcaaaccaatacaatttcccaaaagactaagaacagacacttcccaaggaacagatacaaagctatgtttattgcggcactattcacaatagcaaagacttggaaccaacccaaatgtccaacaatgatagactggattaagaaaatgtggcacatatacaccatggaatactatgcagccataaaaaatgatgagttcatgtcctttgtagggacatggatgaagctggagactatcattctcagcaaactatcacaaggacaaaaaaccaaacaccgcatgttctcactcataggtgggaattgaacaatgagaacacatggacacaggaaggggaacatcacacaccggggactgtcgtggggtggggggagcggggagggacagcattaggagatatacctaatgctaaatgacgagttaatcggtgcagcacaccaacatggcacatgtatacatatgtaacaaacctgcacgttgtgcacatgtaccctaaaacttaaagtataataataataaaaaaataaaaataaaaataaaaataaaaaacaaagctattaagcaaaagaaagaactcagccgggcgcagtggctcacgcctgtaatcctggcactttgggaggccgaggcgggtggatcacgaggtcaggaaatcgagaccatcctggccaacacagtgaaaccccatctctactaaaaaaatacaaaaaattagccaggcgtggtggcgggcgcctgtagtcccagctactcgggaggctgaggcaggagaatggcatgaatccgggaggcggagcttgcagtgagtggagatcgcgccactgcactccagcctgggcaacagagcgagactctgtctcaaataaaaattttaaaataaaaaaaaaagaaagggctcaacatattcactgactagggaactggtcattagggaacgtgagttaaagccaaaagtcggtaacgccacacaaccgctggaataaataaaggatgttttaaaaataaacagccacaccaaatactggtgaaaatataatgcaaatggaatctcatacattccaggtaggagcataaaatcataccaccaccttggaagacagtttggcaatttcttatgaagttatacacgtactcattaaaaggcccagcaatttgacttctgggtgctcactcgagagaatggaaacataggagcacatgagatgtggatgtgaattaaccacagctatactcacaagaggcagctactgggaaacaacccagatgtcctcggacagcaaacggggaaacaaacaagcagattcgtacaagttaaaaatgaaccactgggccgggtgcggtggttcacacctgtaatcccagcactttgggaggctgaggcaggcggatcacctgaagtcagaagttcgagaccagcctggccaacatggtgaaaccctgtctctactaaaaatacaaaaattagccaggcgtgatagcgcacgcctgtaatcccagctagtcgggaggctgaggcaggagactcactcgaacccaggaggcggaggtttcagtgagccaagatcacaccatgccactccagcctgggaaacaagagtgaaactccatctcaaaaaataaataaataataaaaataaaatgtaatgtaccactcatctccccaaaacagggctgaacctcaaaagcactctgttgtccaaaagcagggccaggacaagggtgaagcaagagagatgccggcgtacaaactttcaggaggtgattgctcggagaatctcactcttggggtgtgcagtgtagatcccacactctcttgcctcccccctagtcccagccctgggcaaaagatgacagcaatttaagaataaacacagtacaattccatttatttacaattcaagaacacacaaaactaatttatggtaatagaaatcagaacagtgcttgtctcccgggggtaggaattgattgaagggacgagaaggaacttccagaggtaatggaaactttctgcagcctgacggaggcagtgatgacacaggtggtacattttcaatactcactcaattatatacataagatctgtccatttcactgtatgtaattattatctcaaaaaaatgttaaaggaatagatagtttctttttttaaaagaccacattgaatgccactgtcaaagcaagggaactgcatctggcaacacaaaggcattttctaagccacgtgcatgcttctagattttttttttcctttttttaatgcttctagatttctaaacaagtttcatgagagagagaccattttaatcctgggaagctagtgtgactggggattgaggtggaaaaggtgagaacgtgacggtcagggtgaggagagaaaaaaatcgaaataacaggcgagaatgcgtcctctacctccatttgtcatctaagccaccggactcacccccacccccagcctacctgttcaggaggcccttgggccagggtgggcagcattttcagagcccttgaccccagtcggtccattagggagggtgcctgagagcctgaaagctaccagggcagacagatgagcctgcaggcaggaagcactgtcatctgaaacatctgtcacagaaagcactgtgctaagaatacagcagctgactttaagtaaagggcaaaaatcggaaacactaacaacatcaatgaatgttatcagaaaaatgggcaatcttaagtactgttaacagaagtataattttggaacgtaatttggcaaaaattattaaagtgttaaatattcatactctatgtcttagcattcccatcaataaaaagaatgtttcagatacacttaaaaaatatgtttaatgaaatggtattcactaaatctgtgtgttaatagcaaaaagaaaaaattggcaacaactgtagtgtatgctaataaggaaatagttaaaatatgtgcattctacgatggaataatggctactaaagagtaaacaccagacatttcaagtaactcaatccaagggaaaataatataacaatacaggccgtatgatgccatttgttatgtacgtaagacgtccatgcacataaaaattatgtaaggacttatagcaaactgctaatgttaacctgggatacagcagaatttgaaaaagcagagaaatccaagaaagtttcactttaattctgtactgtttgagctttctttgtagtgaggatggatttacattatcctgtacaatatttttgaaaagcatgtcacagagctgtaggatcacatgtgagtccaacttgtgagcctcttctcgccttgagggactaagcgctaggacaacagttcactaagtgtggtctgcagacaccattctaggcagtcttgtaacatcaaaactattttctttttctttttttttttttttctctgagacggactctcgctctgtcccccacgctggagtgcagtggcacaatctcagctcactgcaagctccacctaccaggttcaagtgattctcctgcctcagcctccccagtagctgggattacaggcatgcgccaccacgcccggcgaattttttatttttagtagagacgaggtttcgccatgttggccaggctgatcttgaactcccaacctcaggtgatctgcccaccttggcctcccaaagtgctgggactacaggcgtgagtcactgtgcctggccatcaaaactattttcataataatactaagtggatcacttgaggtcaggagttcgagaccagcctggccaacatgacaaaacctcatctctaccaaaaaatacaaaaattagccaggcatggtggcgtacacctgtggtcccagctactggggaggctgaggtgggagaatcacttgaatccagaaggttgaggttgcagtgaaccaagatcatgccactgtactcaagcctgggtgacacagcaagactctgtctccaaaaaaacaaggaataataataataagctattatttgccttttttcttctaactgtgctgacatttgaactgaagatacaaaagcactgatgggtataacacgttagcaaaacaaaccaggggcaccacgtggggtctcgctatgctgcccaggctggactgcaatggctactgacaggcacaatcacagctcccaacagccacaaactcctgggcccaagccatcctcccacctcaactttccgagcagctggaactacaggagtactgggcccagttaaaatattcacttcattaaatcttaaccccttgataagatctcaacattctgtgtgaagaaatagaaagcacatgtaagacatttctggtgcatactaaagtgcgatggttggtcttccatgtttgagttgtgaactgaactagccctttttatgtaaaatattttacttaaaaactaactgaccaacaatagttactcaggcttgagcatctggtagacattttctcaaaaacgaattaaataaacgttatcatttgaaagaatacaaccacgagtatttgttgacaataataaaactcaagctgccaaacacatatctaaattcttaaaaatttgtatctaccaccacaagcttgatggattcctaacgtttaaagacttttcaataacttgtggtgattagcttgtaatttctttaataaggcataataaaagacctacataattcagtgcgtcgatattttcaaatgagcaatgtatgatgttacataaccatgcatggataaaggtccattcaaagtgcaagagaccaatgaattttagtacgacagtttgaaaagattattccgtaccacaactaaccttccagaaaccactacgtgtggaacacttgctgttaagatgtcaacaccgcccaaagccatctagacgttcaatgcaatccctatcaagacctaactaaatattttgcagacataggaaaatctatcctaaaattcatatggaatctcaagggacccaaaggtccctcgccaaagcaatcttgaaaagttagaacaaagttgaaagagtcacactttaagtcaaaacttactacaaagccacagtaatcaaaacagtgtggtgctgacagaatgacaggcatatggacccatgaaatacagtagagatcccagaaataaacactttcgtatgctcaaataatttttgacaaaggtgccaaaaccattcaatgaggaatggacaagcttttcaacacatggtgctggaaaactggtctccacatgcaaaagaatgaagttgggcccttaaaccatacacaaaaaattaacccaaaacaaatcaaagacctaaatgtaagacctaaaactataaaactcttagaaaaaaacaggggagaaggtttatgacatgggatttggcacagatttcttggatatgacatcaaaggcacagataacagcaaaaaaaaaatagacaaatgaaatcttggtaaatttttaaattttaaatttgtcaaaggacactatcaacagactgaaaacacaacctatagaatgggagaaaatgtttggaaaccgtatctgtaagagaaaaatattcaaaacatacaagggaactcctaaaacaacaatgaaaataacgcgattcaagaacaggcgaagaacctgcatagacatttttccaaagaagacacacaactggccaaggagcacatggaacggtgctccacaccactaatcattagggaaatgcatatcaaagccagaacaagacaccacctcacactcattaggatggctaccaccaaaaaaaaaatcacatcacatggtgatgatgtggagaaactggaactcctgtgcactgctgatgagaacgtaaaatggtacagccactgtggaaagcaatgtagtggctcctaaaatagttaaaagttgaaccacaggatccagcaggttgaaagcaggggctctaagagatatctgcccgctcgtgttcagagcagcattattcacagtagctacaatgtggaagcaacctaagtgtccatcaacaggtgactggataagaagaacggatcgtctatccatacaacagaatattactcagccttagaaagaaaggacattttggcacatgccacaacatggatgatccctgaggacattatgttaagtgaaataagccagtcacataaggacaaatatttcatgattctccttctatgaggtccctactgtagtaaaaaatcacagaggcaggaagcagaatggtgggtcctagagccaacgggggagcacagggagcgagcgtttaatgggtacagagtttggctttgggaagataaagttttggaggtggatggtggtgatggttgcacagcaatatgaatgttcttaaagctactgaactgtacacttaaaaacagttaacagtcaattttattgtatatgtatttgacccaatacaacaaatcggggaaaagaaaagcatcctcctcaacctgatgaacagtatctcgcaagaccctaaaactaacctcatgcttcaggaaaatctaaacgctttccctctaaggctgacaaggccaggacagccattctcaccatgcccaggtaaaactgcactggaggtcccagtgagtgcactaaggcaagaaaaaataaacgaaataaaaagtaaatggggggaaagaaaacaaactgaaagctaaatctaaaatttatctgaaaataaaaaaactaaaatagccaagacaattcttacaaagaaaaagctggagggcttactatgttctttcaaagagtattaggaagtgacagtaattacgaccttaccatactggagaaaggacagacacatgattcaatgaaagaagacctcgagcaaaggcccatgaatgtatggctgacaggctttcatcagaggtgccaaggaaattcaaatgggaaacagacatacgtattgtggggcaggaaagcgaccctcaactgtgaccacactacacacaaaaattaactcaaaattaacagtaaagttaaagctagaaagtttctaaaagcttgggttaggcagatacaaaaaacacaaaccataaagaaaatgaattgataaatcagacttagcaaaattaaaagtttttacccttcaaaagacactaagaaaatgaaaaggaagccacgtaccgggagaaaatattcaccatacatctgacaaaagactctgtcatgaatatatatagtactctgccaactcagaagatgacagtccaattaaaaaatggggaaaagactttgaaaagacacttcacaaaagaagatatatggccgtcaagttaagtacatgagtagatgttcaacatcattagtcaccagggcaacaggaatgaaggccacaaggaaataccgcacacacccaccaggatggctaaagtgaaggtggccaatgaatgcattcgggatgcggggccagcggaattcaatgaaagagctcgggatgtggggccagcggaattctcacacacgggtggccaggggacagaattaggcagccactttggctcatcagctttttctaaaattaaaacataccatatcacccagaggccccactcctaggtattatcccaagagacaggaaaacatacataaagagacttcaatacaaatgttcacagaatctttatctgcaagagcaaaaaaccggattaaaaattatggtatatccgttcgatataacaaggacaaccgatacaagcaacaaatgtgaatgaatgcttttcagaaaacattctgccagtgaaatcaccagacacaaatgactgcatgacgtatgattccattcccacataattccagacgaaacaaaaccacggtgacagccagactgagggcaagtacgctgggagcctgttacctccacctgccactaggaagtcgcaacaggcagcatgagtccagacacaatagcaaacagccctcctggaaaagtgggatttctcaaagaacaggaacatggccctttggaaatttcttgtttatttcacctaatggtcatttagagtttgtttttacttttttaataatacaaatgtatctaaaactagggtggaggctaacacctgtaatcccaccattttgggaggctgaggcaggcggatcacttgagctcaggagttcgagaccagtctggccaacatggtgaaaccccgtctctactaaaaatacaaaaattagctgggcgtggtggcaagtgtctgtagtcccacctgctccagaggctcaggtgggagaatggcttgagcccaggaggcagagactgcagtaagccatgattgtgccactacactccagcctgggccacaaagcaagactctgtctcaaaaaaattaaaaaaaattaagccgggtgcggtgtctcacgcctgtaatcccagcactttgggagaccaagacaggcggatcatgaggtcaggagttcgagatcagcctggccaacatggtgaaacttcgtctctactaaaaatacaaaaactagccgggcgcagtggcaggcacctgtaatctcagctactcgggaggctgaggcggaagaattgcttgaacccggctggcagaggttgcagtgagctgagatcgcgtcactgcactccagcctgggtgacagagcgagcctctgtctcgataaaaaaaaaaatacataaaataaaacttaaaattaaaaactaaaattaaatcagggtggaggtagcacgttaaatataaatccatggggttttttgttttttttgtttttttttgagatggagttttgtcctgattgcccaggctggagtgtaatggcatgatctcggctcactgcaatctctacctcctgggttcaagcgattctcctgcctcagcctcccaagtcattgggattacaggcacatgccaccacgcccagctaatttttgttatttttagtagagacagggtttcaccatgtttgccaggctggtctcgaacttctgacctcaggtgatccacccacctcggcctcccaaactgctgggataacaggcgtgagccaccacacccggccaaatctgcgttttaagctgacagggaagacacaccagcagctatgatcgtgcatgctcctcttccatcttccgaaagacaagagctctgagtattgaaaaacaattcaggaaaactatcagccacctaagccggtaaagcagcaaagatgagaatgaaagtgtgactatgccccaggctcctagggaactgattctccacagagtaaagttttttaaaaaattctaaggaagggcggggagaagggtggtgtttctccccacctccctcatgctcctaaactaacgtcatgccccaaggaaacgagagaaaaggatgtcattaataaatttataccaagtttcttttcaatggtgctgaaaagtatatgcaaatccatctgtaattaggtttaaaattccatttcatgggataatcagacttcaaaaaactcaattttagttttaatcagattttaacaaggatattaagtccatttcgtttagaaaaggaaaaaactgtgaacttaacacaaaatgtattcaagcttagccctgggagataattaaataaaattaatttggcaagggttgtcagtaaatggaagtgctccaaacagtggttcatgtttttgatggagacaaaagcaactcctcacagtacaaatagacccggagctcagcactcgtggaggagggtggagcctcttcccaggggcagggaggctggaaaccctaacccaaccctcagtcagaacagggactcacacgccccacagggagcccaaactgaggctgacaggtgcaggctcacaaaccatcggcccaagccacgccccagcatactcacttgcccaagcaaccggggtgagacaagggccacccagctccgacagccaccacgtcctggagagaaagcgtccccgcccagaggacggtccttgtcctagaacagcaaggccctccaactcttggtcctcaaagcccttccccgcctccgcacccagcaccacattgctgtgctgagtttcagcacagggaccgtgcgtcctgctctctgctgcatctcccagccagtatacaccacggtacgtcataagccctcaacaaatatttgttgaatggaacagacgtgatcacaatatgtgctcctgggaaccctcggctaccagaaaaaaaggcgagacagaaatgagcacttctcaaccctgggagcaaatttataagggttttatcccttcaaaattattaccaaggggtaacacggccgcgggtaactccagattcctccggaaaacctcactgtgcactgccaaggctccagccagagcaggtgctgagccgcgatccgggagacgccagtctcaccctaggctctcttccacaaccaccctcaggcaaggccacaccgtcgcccaactgtcccaaatctggaaaggaagaaaccaccatgatgctgtgtgggcagcaaaaggctctgcatgggaaagaaaagctgcagggaaaaggcagcaaggctctgcatggatttttttttttttttttttttttttgagtcgggttcttgctctatcacctaggctggagtgcagtggcatgatctcggctcactgcagcctcggcctcctgggctcaggtgatcctcctgacttggcctctcgagttgttgggaccatgggtgcgtgccaccatgcctggctaatttttttgtgtgtgtgtgtattcttttgcagagatgaggtctcactatgttgcccaggctggtcctgaactcctgaggtcaagcaatctgcctaccacctcagcctcccaaagtgcggggattacgggcgtgagccactatgcccagcctctgcatggattttttaaaccaaaattaaatggctagccctgtatcctcaggtaggagttagcaggcatggccttcaggccaaacctactcccaccccagctgtcttgaaaataaagtcttactggaacacagccatatccattcatttacgcactgtctacagcagcttttgcactaaaatcagtgacagtcctgtttcatcctgggtcatctcagttttcacatgaaaggtcccacctcccaagcaaaactcctcagtctcagacaagccgtgagggctaatcaccctattctgggctagaaaggcagagccaactaattgtaacagagaccttatggcccccaaagctacaaagtaaatatttactattaatacccagccctttacagaaaaaacgtaccagactctgccctaaatccatcccaacctatcataggtacccactgtttagttacagaaactcaaagaaaacctagcatactaaatgatgaaacaagagaaagtaccttttctattattaaaagtctttgggctggacgcagtggctcatactgataatcccagcactttgggaggccgaggaaggcagatcacctgaagttaggagttcaagaccatcctggccaacatgccaaaaccccatctctactaaaaaaacaaatacaataatacaaaaattagccaggcgtgctgatgcgcacctgtagtcccagctactcgggaggctgaggcaggagaatcgcttgaacctgggaggctgaggttgcagcaagcagagatcatgccactgcactccagcctgggcaacacagcaagactctgtctcaaaaaaaaaaaaaaagtatttgaatctaaagctcaagcttagaaaacttacagataacttagcagtgacccctactgggttatctatgccacttcagctaagctctcgtaaacaataaaaacacctaaactaaaagaaatgcttgtaatagctaccaatgacactcttttcaactcagtctactaaaaatacctacttttcttatccgagtcaataaaaagtgagctttgatttaaaggaacctagttgatacctgcattttgtaattgcaatcctaataaaaggcaaaatactcctgagacctaattgcagtaaacgctagcaatgcaggaaaagtaaaaactagaaagagcaaatgggaataccaagaattgtgtgtcaaaatgtcctccaaatagactcgtaaataattcctatcagctcaaaagcagacaaacagcagtgctctgaaaaattacacggggtggaagcctgcccctcccttgctgtgggaggactgtttgattccatgaaactgaagagtagtttgcacctgataaaaaattaattgctaatcttctaactcagccacctccgcgaacaagatagtattgtgttgcagcctcagaagttaaacgcttcctctcccaagtaattactgctcttactctaccttgcagagagcctcctcccactgaaaaccaaatcccagaactgccaggaggtgcttggctcccagcaaaggcaggcaggtcagccctccagcaggctggtaggtccttcttgccaaagttcggctgggagccatcaggtctgaaaaagaagctatcagctgatgggcttcatgcccgcacatgtgctgagttccgctcaggctaaatggatggcagctcccaacagaatcctttcagtgccagcatcgggctgatcagctcacaaaaatgcaggatccagctgcatggcaccatgtggccagccagatggatggaggttattgagggcacagctcaccatactccaggatcagccaagcattccggcaacagggccacaaattcactggatgcccttgggccagtcagcccctcccagaacccagcttagtccacagggttctgaggaagaacgaatgagacgctgattatcaacaggctttgtcaactacacagcagctctccagagccaaccaccaccgtcaacagtgccatcctgccagcaaagtgaagaccctcttgagaacaggctctgtctttaaacaaataaactctagaaactcttgtaagccacctgtttccaaaccagggaaaacgtctggccttcattcccaccagcgtcattcatatccaacaaggccgtctccaactaagatactcccgcaaaacgctcctgcggcatcttccaaaagattgcatctgaggaggcacccctgttgttttcattgtttaaagctgtctgtgtgtgtgcactacgtgggcagactgtgctgtgctcgtcacagcgtcgccagagccagcccaaagcctggcaaacggcaggtctccaaataaatgttcagatgaacaaacaaacgagcgtctccaaaatcacagtgctacccacagacactgtggtcacaaaggaacaggcattcacctgaagaggaaacagaaaaacagggagagtctggccttcaacacgaaccctcttcagaagtcagaaggcctcgggctccctgctcacaggaacagtgcggctcaattctaactctcactacaacgcggctgactccacggctcctactccatgaggctctcaactgacaacaggaaacaccgcccaccctccccacacttcggggctgctgaaacctgcagcgggtcagacagccccagggacttccaccagcagggtcctgccaaggcgccaggtcctcgccctgcgaattcagtgaggaaagaggccccttcacaattggcggatgtgctcctccctgatgaagaccttctgcggctcctgtgacctgcaggacgcggtccaaaccaccctcaggacaggacagatccctgccaacctgtccagcttctgccacatcccaggagaactgtggttagaaccagctggagccacacaacactgtccgaacacgcagcatctggccaacctgtgtgctgccagcacccaccctatctggaacatgctgccagcctctcaagtgtcatctcttcaggagccacgcttgacctagcagacatatgcccggctagatctgagaggactggaaaacagcccctgacttatagctgtatccccagcacccagcaccaggcctgcacacctatgtgttcaagaagcactcaccagtgaagaagaggaagaaaccccactgctctggaggcttctagcctctcctcactcctcctctcatctcccgccccgacccacgcatcactccgccgacgcctggtacacacgacgtgcactgcacagccaccttctccctgcacacgggcccaagctcggacacaggcacgaccaggactggcgggctgcagagctctctgacccggtgaggcactggccctcaggctcaaagccacctgcaaacgccaaaatccctccagactcgggccagctgtctgctcctctggctctgccactcccctaggccggctcatccctgcccctcactgggcaggccagccctagggctcctctaggagccatgcaggcctgacatcggctgctgtctgacacctccttctggctacatcactgacacttcaaacacacattcccaaaacagagttcacaacccctccctgcctgagagccaaaactggtcctagcccccgggtcccagcccccaggtcccagcccccaggccccagcctgtgactgaccccatctccctgcacccacagggcccatcagcccctcctctaagagcaggcctgggaacaggcccaggacggggcaaccacacccagttctgccccacaagcgcccccgctcatcccaaggtccaccatgagtttgggtttttttttttttttttggaggaagggttatctttatatttttatttttaaaaatagagatagggtctcacagtgttgcccaggctggtcttgaactcccaggctcaagcgatcctcccacttcaggctcccaaagtgctgggattacaggtgtgagccaaggcacccagcccagcgtggatttgtgccaggaagagccagcaggagctgaccagccccatggaagcctccaggccggctgcctgctctcatctcccaagagcccgcctttgcttctgccagccactcacgctctccacaggctgcagccaggtacacaccccccttcaagcaacaaaaccactgcctgagcacctggcctgctctaagcccagggctgagacaagggggagccagccacacacaacaccaggagcgctggcatcgccggagcaaggagcccgtgatggccgtccacccgggacagcaatcgcgctctgcggcacgaggctttcaacagaggcgagtgcttcctgggggtcaagagcatggaacacacacttcaggccccctctccaggctgcaggccaacaggcgtccatgagacagacactccctgatgtgtcccactcagttctcctgccgctgagtgactctcccagggaggcccagagccacatgctcttggtagcccctactcctccaggtgttaaagcaggtgcccatgtacagtccacaagcacaggccatcaggctgggcaaggatgggcaaggaaccaggcccctgccctttgaggctcaggagctccaagctacagaatagggttccaaagctccagccactcggaggacacacaggccacaggaagccggcgaccagtccacagagagacgcgctgtggggcccgacaggctgaggtcaggcagtgggatccccccttcacagtcctcccggccttgggcggggctatccaggagggggctgcccctccctgccagagtgcactggggcctgtatgatgccagcctgagaaagatgcgcaactccagctccacctgcacggagatgccccacagcagatccctgccaaaatggcatttgcaaagcgaggaaactgagccccaggaaggccacaatgatcaaaaacggtctcactgcaacttccagatacattttctaggcctctggttttggcctttttaaatgttggcatatggactaaggaatggaatacctaactgctctccaagaaaggagtttgttacttctgggtcacagattccacacgttcacctttctggccttcatacctcacgtgtcacagccaagactcctaggaggtcccctgcctgccgtcatgaagggcgcctgcagcctggtgcgccacccccacatgccctgcacgcggcaaaccgctcaataaggactgcagtgaacactttctttaaatcattgatggttttcttaatcatcttagaatcactctgctacacggatgtccctggagtttcgattcctaaatcagcagtcttccactccgcatccgcgcccccgcagtgccccgcctggcacgggcaggggtgcctcccagacaacggaaaccagacgagggccaggccaggcagacacaccgggcagccactgaactgctgggccaagacctccagcctcccaaacccagattcctggtcctaggagacggctttctcagctgcagcccagactccgcggtaaggccacaacccaacccaccacccacctaggtgcttcccaacgccatgctggccagcagggcccacactccgcaccatccaggtcagctggaccagtccccagcttagggcagacagtgaagcctggatgaaagggatgggagagccccctgcagtcactggtgacaaatcccccagagttccaggaagccacactcacaaaggcccgagggcaagggaggggtaactgcccaacactctccatgaagccaagggtctcagagctcttcccacgcctgccctccatcctccacccctcccggggcgcacccacgacaggtggagggtgaagagcgggaccaaggcctgccggccaggtgtgcaccaccctacgctaacatagcacgcggggcgcccacccaaccaccccacacccgccccgggccgcctgccaccctggaatgcagggtggacacttgcgttcacctggaacctcttctccacctcatccacatcctcctcaggactccccaccagacgaaagtcccatggcaacagccggatcttgttctccactgggcccccgacaccaggcaccaggcctgcacacagggggtctaaggaaggttcgctggcctggctcggagccctgctcctcagcacctggctgtgtaacagagccccagggtccacacacagctgccagtgaaggtctctgcattctgcccaggtaagacacgcacacggtacttccgatcgtgggagatcagagctctctgcacctggataacagtggaaacatcgtcaaacaaaagccaggaaagtcagatcacttagtccacatgagccgccccacaggctggtgctgactggcttgtgatgaagtgatcatctcacagcacttctgtgaacgcaagcccgctctccccaccgcggctctgcacaaacggtgctaccacgaggaccgcctgcttcatgcacacggcccccctgcagccactgagcgtgcaaaggctggtccacccttcggcccagcctcccctcccgcctgtccagcagaatcagggcacctgattccaggtgaccacaccagtgagaagcgtgcaggagctgggaggagcgggatgcgggtgccgagtgaccgtgggttccaggaattcaacagctcaggatctcctgttcctcccaagaacccaggccacgcagggtaggtggagggcgggaagggtgggtggtgcaggcaagaccagcagctcctgacacaaatgacagctacagctggctgcagggagtgaccccaggtgatcctgtagaggtcacacctcacagccccaaagctgacgttgaggaatgttgggtggggagctgtggagccccgtagcctgcctgagaccccagctctccgaaggccatggcactgctgggaagtcctcggagagaagggcaggtagtggtgggctgcccagaggaggccttcagcttctctgcctctggccctcggctggcgctggcttcaagccgcctgtcaaaatccccctcctaccagccctgtcacaaagctgcccagacccttcctccattccacgccagggcaccccctgctctacctgtaaaagtagggacgtggacaccctgggagcccctagcccacaaggaggggacagcacgcaacaggaccccagtaagcacccatgagtaaaaaccagcccagataccaccagggatgccaccgcctcctctaaaataaatcctggaacctacggcagccggacttgtctaaagcctgtcactctggccttagactttttaaaatcaatttaaaaagagacctataagtagaagagccctatctacaaagcttggagaaaagccccaaaaagagctccgagaccaagtgatagcgtttccacccggacacgccgcagagcactcagctgtctgtgcagtcaggcacatgcaggggtggagcccaacggtctcttctgggaagcccttctctcgcctctccctgcggggtcccaacacccacagcaccgcccccagactctgacagtctccagcctgcccgaccgtacctggaatgaagcccaagggcggcgtgagcctgtcagcactgctgggaacgcccatccgaaacttcacaagggggcggagaggggcacaggctgcaccccagccagggccgtcgccaaagcgaggcagctgtcaggaagctctctgctggccttgctttgggggtctcgctgggatagtgcaggaccccaggggggccctgtcacagcagccaagagcactggaggctccgcccatacatcaccaccaactgcaaggcacagagacgccctcgctcggtcctccactcttcaaaggctcagcacacgcctactgcacgtctggctcaggggcgctaaagggagaccccagctcttaactcacaatgctcaggattgagaggatgcgtttacggaaaaccaacacaaccccaaggcagaaagcggccaggactcagccacaggaggagctggggttgagaagaggagagatggcaggcaccgtgctcggacggagctgggaacctggctcacgccccaccctggcctgcacctctggagggcagcacactcgccactctccagctccagggtcctgggacctgcacaccacagacgcacaggcctgagggatccttctccctccagatcatgggctccacaagagcagctcatggtgaacgaatgaacaaacgaaaaggggaaacgtggcccagaccacgaggcatccggcatgcaggcccagaagaagggccatgctcacacaagtagccagaaggccaaacgcttctccccctcctcctcccatgccccaaagaaaaccaaaccggcgccaattaaaatggaccaacatacctgacagtcgcccaccttcccaagcaccaccagggcgtctggtattgatcaactcaacagccgggtaattacaaatcacgcgcacggtaactaggataataaaactgtccaggctggtcaattagacccttccttagaggaaaatcatgcatcccctcactgtcctcctaattggcctcacacatcagggaagctgggccctgagacttgtcatctgaccagtctacaaaagtttttgggaaaatgtccaggtcagcactgacaggtgcccagctttgactacaggggatgggtcagcagttccaggtgggcacagctgccaggactctgagccagcaatgcccgcctcccacctccccagcccagcctcctctgcagcccctcctcaccccctcaggcctgcccttgctgacgggtataatgcccacccgccgggatgggaagcaaggccagattcaggcacaacgggacaggcaaggagccaaaaacagcggcatcttggccacgagcaaatgatttcctccctgaagtgggggctcggctacaggacttgacacccactcccttcctatttcatagggtccccctcagtgggagctgctaaatgacagttttgaaaagccaagcctttgaagatgcctgctctcctcactgtactgtgacttcgagctgaatctctctagaaacgttgaaagcacaccacccccattaggtgacggcagtcacacgccgtgacgggagcgcacagcactcatgcttttcgggagggcggtgtggcaccagctaggagtctcaaacgcacatctcttttgaactaaaaatcatccttttaagaatttacccaaccagcatagcatggctaattggggaaagaagctggaaacaccctaagtgtccatcaacaggggctgctggagtctgagtccgtctgcactccagcacaccctgcagttctttaaagtagttcagcagaccagcctgcgctggggccaaaaaactgtcaaaaactgagtgaaaacagttgcagaataaaactgtggaaggagccccaattttaaaaggtgatgggagtacataaagagcttctatgtacacacatttccagaacgacacacaggaaactcatcaggcattgcctagaaagacgaaccggggccaagcacagcacgccctgctgcccacctccggggcaatcagttctattctggaacagccccccaggaatactgagaacacaaggtgacgatggctaggaagctgtgacacagggcacccagccctgagtgaggtcaccagggagggcaggaaaggaagaacacgttccacttttcattccattcatttgcatttatgcagcttgttctgcttttcatcaaatgtgaaactccttgaccctctgcagcctgcactgaccccacatgctgccactcctcacagcactcctgtgacgtaacaaagacccaggaggtgcacgcagccgtggccgtaggccttccataaactcaggggatgggtccctccccaaatgaaggctggcttaaacagcacccccaggccactctccaattcagtccaagtcgccactaaggaattttccttcccctcacagctaatccgaagagctgaccgtctgctgttgacaggccagcttgagtgaggtatgatctgcgcacgtgaacagtttgacaagagcagtgtcatgagctttgctgcgtgtacacctgtgcggcgatcacatccattacgccaaagggtatttctagcaccccataagaccccaatcatatcccagcacgagactccagggatcactgacctgctttctatcactgttgctcagttttacctttttaaaaagttcaaatcaatgggatggtatagtaagtataaactcagtaagtctggcttccttcactcagcaagagagaccctttcatgtttccaagcaccgccgctgccgcgcattacactgcgtggagacgccacggtccacgtatcccttcacctgctgacaggcacctgagttgttcctgctctcagactgttagaataaggctctacaaacattcctgtacaagtcttcatgagaccacattttctcttgggtttctcttagattaaataccgaggaatggaactgcagggtcacaccgtaagtgtgtacaaagctaccaaaccatttccaaagtggccgtaccacttgctactcccaggggcaacaggcctggctgctctgcatctctgccagcagtcaggatggtcagtctgcttaattttagccattttattgggtgcccagtggtatctcactgcagtcttgaaaccgcctttacagaattttaagtaacgagagaaatctacattactgactccaccttgcttctaacctcacaggatcttttctttttttttttttttttttttttgcttattctaatacagaggccaagataactatgagaggaatgtagtttatagttaaacttcaaggcaaggaaaaatgacacccgtccttgtttggagattaagactggcattgctacaggggcctgaactttgctaaagaacaggcacgggtaaaccatgacctgtcactgcttacttagcttgctcttctacagtgcctgctacccggagtcacgtaaccagacgttgtcagattcggaacttccctaacggctcctacagacatcactgctgtgaaacctaaaaaactggtctttgggatatttttcagatttagcatttcagcagatcaagagatgccacctggacttgtgaccccatctcccaggaactgactcagctgcacggagacagtcctgacacccctatcattgcatccccaacacaaccaaccagcattcaccactccctaggccgctgcccgccaaaacaccctcaagccctcgcctcctaattctcagggagacagatgtgagagttatctcgcgtccacctccctcggctggctctgcaatcattaaactccctctctgctgccacacctgccgttctcagtgcattggctttctgggcagcaagaagaaccctgttgggcgattacagtcttaatttgcattcccctaataactaacaatgttgaccatcttttcatgtccttatttaccacctatatatcttctcttgtaaagtatctgttaaaagcaggccgggtacagtggctcacacctgtaatcccagtgctttgggaggccaaggcaggcagatcacctgaggtcaggagtttgagactagcctggccaacatggtgaaacctgtctctattaaaatacaaaaattagccgggtgtggtggtgcacgcctggaaccccagctactcaggaggctgaggctggaggattgcttgaacctgggaggcggaggttgcagtgagccaagatcatgccactatactccagcctgggcgacagagcaagattccatctccaaaaaaataaataaataataaagtatctgttaaaagtcttttgaccattttttaaactatggtaatcttactaatttgtaagagttccttctctatcctggagcacatctttggtcagatacatgttaatatctcgcaaatattttcctagtctatggtctgccttttcactgtatcttttgagagcagaagttttcaattttgatgaagtctaatttatcaattttttcatttatggttcatgttcgttgtattgtaagacctctttgccaaaccctagcttccagattttgtgacttttacacataggtctatgcgtcatttgagttaaatcttgtgtccagcatgagacaggtgttaaggctcatcctcaccacgaagagcctactggtttaccaccctcggtgaaaagattctttctcccactgaattatctggacactttgacaacaatcaacactgtattcttcaatcatttctgaacattctactctgttctcctgatttacatgtctatacttaataccacagtgtctcaatttatgcaatttacaacgtgtcttgaaattggccagtgtaagctgtataacttgttcttttttgaaactgttatggctataacaatttataggtactttacattcccatagaaattttagaaattgtcagccgggcacagtggctcatgcctgtaatcccagcactttgggaggccaaggcgggtggatcacttgaggtcaggagttcaagaccagcctgaccaacatggcgaaaccctgtctctacaaaaatacaaaaattagccaagcatggtggtccatgcctgtagtcccagctactggggaggctgaggcagaattgcttgaacccaggaggcaaaggttgcagtaagccaagatcgcaccattgcactccagcctgggcgacagagtaagattccgtctcaaaaaaaaaaaaaaaaaagaaattttagagatcagttcatcaatttctgctggggctttgattgggactatgttaaatatttgggtcaatttgagcaaactgccatcttaacaataatgaatcttccaatacacgaccacagtacctttacgatactctgaaatatatatttggtctttctgttccctgacatacatgcagctccttatctggagtgagaagagtgtctcttgtgaactaatgagctgagtgctggttggcagcccccaggcagcttcagatagggtggttatccgaaacaccaaggtgagattagagggttgggactttgagtcccacccctcaacctcctaggaggggagaggggccgaagggtgagttgatttccaacggccaatggtgtaatcaatcatgcctctgtgatgaagcctccataaaaacccacaaataaggccagggttcagagctgcacacacagaggctcctggagggtggtgtgcccagagagggcatggaagctccgcgcctctcctcacacctcactctgccaacctgttcacctgtattattcgtaacatcctttataagacatgactaaacataacaaagcatcttcccgagttctgtgagccacactagccaattaatgaaacccaaggagtgggtagcaggggcctcgtttaacagcctgtcagtcagaagtacagctgatgtcagtgaaagaggaagagaagaaaaccgtaaaatgaagcagagatgccggcctactacttgcacctggaatctgaagggggcacagatgtgtgggactgggccctgacccattggaagctgatggaactccaggtggagagtgtgcagatgaggctgcaggacatccagctggtgacccctggagaactgcttggtgtgggggaaaccttccagtatctggtgtcagaggctgtgtgagagcagaggggaaaagagttcatttttcctcttacaatgtctccatttttctacatcaggtgatctttaatgtctcagttgcgtcttaagcttctcagtgtacaaatcttacacagattttcttatatgcattcctaatatttcatggactttgatgccatcatacatggtatgtacctcgagtggctcactgctagtatacagaaacataacccattttggtacattgtccttgtatcccgtgaccctgtaaacctcacggtttagtcctactggcttgtcatttattccctgggaatttctatagataattatgttgtctccaggtacagttttacttcctcctttccagtctgtccatcttttctttttgcttccctaattatactggtgaagatctccagtacagtgcaaccaggggtgcagggaacagacaccctgcctggtctccatgtcagggatgcagtccgtccaccttgtattatatcagctggttttctgcaggtatcatttagctggttgaggaagttctcttctcttcctagcttgctgagaactttaaatcacaaacgagtcttggattgttacaaatggttgtgctgttcgcctacagagatggcctgcaccccctttcattctactgaaacaggtgattttccaaagagaagcaagcatcctgcattcccagatgggctccagcctcacgccatctttcccactggcctctctgtattactcctcctccccctcctgtgcccgaggtcttgccgaggatgacacgtacctcaaagggtgtgtgctggcctccgctttcctcacccgtaagtcactccccgagacagaccatgctcctgggagaccaagctgatcacatcgctgcctccagacacacgcctcgcactgctgctaactccctcagcccaacttccagcaccctaaggatgagggtgtccacaccacactcccggcactggcatcctgcccttccccacgtgtgttcacgcaggctcatccacacgcactgtgtccctccttgcctgtgacttcaaagtcgtagaaactaacatgcccccagcctgcgtgaacccgtgtgctgcacatgtcacatgtgcccaggcctgtgtgacacataaggacctcgttccacagggtcttcccatggtttcactgacccaccccagccagcctgcccagcctcctctcctaagacataagaagccctacatggggaagagggtgaccaggccactctctcctggggctcagccagggtttatccaagcccggggcgaggccgaagagccctctgaggactgcaggacgtcagcaccctgtccttagggaagggcccacacaaaggacgtctgacctcaacgccaggagctcacagcccagagcccacaggcctgagggccccaggacactggtcagaaacaaggcaggcatgggacagccagaagcgcccccctgaaggcagtcaggaacagtggccacaagcccctcacatccccatcgaccaaaaccccagtgtcagcaagcaagtcccatggtgggagagcagcggtccactaggccagagagacccaagggaagctgctgtgggaaggatcaccaaggcgggggcaccacctagtggcagcagctcctccacacccacggggcctcgggcctcggcaagccccaaatcccagcaaagcctgggcccgaaggcaagcagacgccagcccacccggcacaggcccagggcactcccagccacagagccctctgcttccaggacatctgatgtcacctcaggtccccacggctgagaggaggggatccccaagctcgcccacagaggcacgcatgtctccacacaagaacagcaaatgcactcagccctcccatgggggcccccgtggccccagcttctcaccacatctgtgtccctgtcgccgacttcaccaccacattcaatgctgccagacacgggaaattcctaagaactaccccaaacctggtccctaaaaacagaaaagaaagcccagtgcatctcaggtttacccagaaatccactttggtttttgtttttgttttttagagacagggactcactcagtcactggagtgcagtggtgcaatcacagctcctcctgggctcaggtgatcctcccaccttagcctcctgagtagctgggactacaggtgcacaccactgagcaccgctaatttttgttttggtacacacggggtctcaactgcgttccccaggctgatctcaaacatctaggctcgagcaatccccctgcggcagcctcccaaaccactgggactacaggtgtgagccactgtgcgcagccagaaatgcacacgtttaccaaaccctcccggtgattctaggagccgtattcgggaccgccagcccgcattcccgtggactctctaggagccgtattcgggaccgccagcccgcattcccgtggactctctaggagccgtattcgggaccgccagcccgcattcccgtggactctctaggagccgtattcgggaccgccagcccgcattcccgtggactgcggcatgagcaccaccccactgacgtccagcgtgagtcacccgagatcacggcctgatgcagaaccacactcagacacccgccctgtggagcacaacacaaggagcagcggggagccctgaaggggcccaggcatggcaggcaacccagcacgtgaggaaacctgccctctaccaggcccacagccaaggccaacgcaggagactaggggtcgacccccacagcgaggacggctccatccaccttcctggccatcagcctccggctgctcagagaggacgctcgcaccagcccctctccaactcacagggccctccacaagtacacgatcacgtcggatcttcacacgcagttggggagaagagctccgtgtccccctttcaataaagagaacactggcccagagcagcgcagtgacttgacacaggtcttactgttggtggcggggggcagggggagccttgaatccagcctccgaagaactatctgtgttcctcatcaaagctgcagggcgccacacatgcatgccacttgcttcccgcccactttaagctggtggtgggcacaggcagcccacctccaccagccctacagaccaacccctcctctccctcatccagggcctggccaccagggagggcagagtgaacacagaagacacaggcaggcagaacccctggggccagcatgccctcatgctggccacgcccaggcagcacccccaggccagctcgccctcacacaagccatgcccaggcagggcgctcagatgcgggaacagggctgaaaggatccacagtactttgaaaccagccagagacagcagccagctgtgccaggtctcgtgcccgactgacacccagtgctccagggcaaactgcacactggaccctccagcagggccgggcccatcaggcacgtgggggcctctgatgtcccttcacaggaaagaagtcacagaggtttctcatctggccagagtatgcctgggagcagaagggtcgccttccaagcaattaataagcccagagaacagacagaagcacaaagcatttaggccccgctgaggccggccctacagaagtctgtgttctacagggggagttcaagaggagacagcagcccgggccgtgctctgacttagcaaagctcaaagaaaatgaagaggcactttcaggtgacagagaactgaagccagtaatgctgatgagaaggtaatggattccagaaccagcagtcggacggtgtggtcaaaggatagctctttcagagagtctcagtctcagcctagtttccaagaacagcaggaaagacaggcaagaagcgggaagccttgaaatctcacaagcaaacacaataagaggccgcctcggcaccagcacctcgggccctgagccccgggctctgatggctccttcaaaagcatcgctcctgcacctcctcgagacctggcgcacacagggcaaccaggaagaggggtccagaccagagctgccaggaggtggtcacctgcaggggcaccgcgactgaagggcaggggccaactgagcggctgctggagaaagatgagcacagggtcctgggaaggatggggcaggaggacagacaggaccagacctgggaacggtccagctacctgtctataagaataccatccccagcacccagggtggtcccccggcagctccaccccacatcccaccacccaagcgctggcactcagcttggcacagactgcgtgaagaggctgctacaagcaccagacaatcgtcttccactatggtgggtgagaaccatttggatctgtgtccctgccccatgcctcatgttgaattgtaatccccagtgctgaaagtggggccccgtgggaagtgtttggatcctcgagtggatccctcacagcttgggtctgtcttcatgatagtgagttctcatgagatctggtcatttagaagtgtgtggcacctccctcccaacactactcacgctcgctcactctctcgctctctcattcctgtttttgcattgcggcgtgcctgttcccccttcaccttccgccatgactgaaagctccctgcggcttcaccagaagccgagcagatgccagcaccatgcttcctgtacagctgcagaagcgtgagccaattccacctcttctcttcataattacccagtctctggtatttctttatagcaatgcaagaacagcctaatacagtgggtttttcttaattctaaaaactcagttcatctccactggttacagttccctaaaatgaatgatttcccccaaaagcaattatttcctcggtatacaccaaaaagagtcctttcacaaagccccgcaacgcagggcaatcagacgcctgccactggtttgctgtggatattccgcttctgaatgaagatgttactaaggcttcagcaggatgagtcactgggttccactgccccatccgctgggaaaggcctcattaaacctgagcagcccaggacaaatgccccgcaccagccacagagatgcctggctggagactgcgctggtgagccggaagcaggctctgctcttcacccaggacccttcaaagaaggcgggaccccggagacacctgcccttccctacctgatgctcaggcccatggtctggtccagtctctcccagctttgcagcttggccagcagcctctgaaaagacaacaaaagcacagaccctgtcatcacctgccacaggatcatcacataagactgacaatcatgatcacggtgctaagtccctgacctctcaggagagcctgccctcatctctgagctgggcgctacatgctccaagtctgcttggaagtggccgggttattattccccaactgcagaagccacactggcgcttcctgcctcactccttcctggccccgtaaattcaagtgtgaatcccagcaagctaaaagcaacgtgtggctgtggagggagaaggcagacagcctcagaaaggatcctggggttgactgtgccccagggagcagcctcgggtccttgagccgttaggactcatccctcccccatcttccaggggctcctcagggaaccaagccctggagcagacagactcagtcctggagccaaacttcctgccatcacacagcagaccaggaccagcaggccctaggagaggagggcagccaccctggagcatgagggagggtgagacactgcctacaggccagcccacccctctgtgtcacatgcctgtcccatgctgagccgcatcccaaagaggtgagtctcacggcccttctaggacggaagcaatctgagggcagggactctgtgcctttgttctggcctcgcttcacctccacccagtgccaagcaccatgctgttatcaacgctccactcggcaagtcagtgaggtattctcacagcccctcctatgcgcaggcacgcacttgactagtaactatatgacagccaacgctacagaacattcgctacgcgccaggcactgctctgagcactttgcatagactcatgtgagcctcacagtcctgacaaggcagccagcaccactcctccctgtgcagacggggagacagacagggagatgaaggagctggcccagggacatggagcagcaagcacccaactacggaatgtggcttgagagccccaactcttcaaccatcaaacaataaattacaccgcgggagagagaaaagatgtcgcatgggagctgtcttttcaggctaagctcctacagaacccagcacctgagagaagagtccctgccagatacccccgctgacagggagccacctcaccgtgggtcacagggccaaggccccaaaacgaccttggctgtatcacagctctgaagaggacagagacgccacgccacccaaggggactctggaagtggccagctggacagctgggcagctgcagagcactgcagatggagtctgccctcctgccaggccccacaaccaccggagaaaggcggcataggtgtgccaggcacagaggggagtggctgtggccacagggaagtggcatgaaggacagaggacccaggcaggggccagaaggcctaaattctggtccaaacttgctgtgcaccgggcaagagagggagcttctctgaacctcagtttcctcctctgcccgcaacatgactgcaggatgttttccagcactgacaccttcctaccaactgccgcggtgaagacagaacacccccagcacagggccctgccagccctgatcctcacagtgccacacgcattctgactcaccctctgtaccagtttcctgctgcaaccgaaacagatcaccacaaactaagtggcttcaaacaacacaaattggtgcggcacagaggctcacgcctgtcatctcagcactttgggaggcaaaggcgggagggtcacttgagcccaggagttcaggaccagcctaggcaacacagggagaccccatctctacaaaaaaaaatttaacatttaaaaagcctggccgggcatggtggctcacgtctataatcccagcactttgggaggctgaggagggtggatcacgagttccaagagatcaagaccatcctagccaacgtggtgaaaccctatctctactaaaaatacaaaaattagccgggtgtggtggcgcacgcctgtagtcccagctactcaggaggctgaggcaggagactcgcttgtacccgggaggcggaggttgcagtgagccgagatcgcaccattgcattccagcctggggacagggcgagactccatctcaaaaaaaaaaaaaaaaaaagcccacaaatgtaatattttatagtactttagatcggaaatccaaaacgggtctccccgagctggaatcctggtgttggcagggttgtgttccttctgcagattccaggggacagtccacttccctgctctttccagcttccagatgacccacattccttggcttgtggcccgtcctccatctccacacccagcaagagctgccaagtccctctcacatcactctgagcccccaggatggcccaggagcccctccccgccgtgggccagctgaccagtcacctcattcgccctgccagggaaggtgctgtgttcacaggctctgaggatgaggcatggacctctctggggaccacgattctgcctcccaccccatcacagcaacctccatgttgtaggtgagcagctggtgggcgtgaccacaataccgaggctcctccaggcagggcagaggacacccacaggaaccgcacaccacacaggccctcacctcgttctccagctccaagccaaccagcgtctcctgcatcttctcctggcgccccagcttcctctgcagcccttccagctcttcctggagcagcccgttggtctctctcatctccctggcagtgccacaaagagtcgctcaaatagccacacaccctagggataaggccaagagcccgggagccctgcccctacagggtctgcacagtgggctccatgtgcacaaacccagactcactcgaggcggctgccccatcccccgcaacccctcaccgcaggtgcgcgctctcctcccgcagctgcttcagctcccgttccagcctagggagccgtaccagctcagacttcatgttcttcacaatcgctgcatcctgctcttgcagggacagcttctgctccagatcctgatggaggccagggacagagaagaagggaaaaatgagccacgaagagacctggagaaaatcacacgcacacggctaagagaaggaagccggtctgcaacggctatacacactgcaggatccaaccacaggacgttctgggaaaggaaggggttgtcaagggctcagaaggagagaggcagggattgactgggggagcagagaggatttttaggcagtaaaacttttctgtgtgacactctaatggcaaatatagaacattttacatctgcccgaaccatacactgtcccactccaagagtgaccctcgcatgacccgtggactctgcgtgacactgatgtgtccaggcaggttcatcaccgtcacacgtgctccactctaccagggtaggctgtgtgtgtaggagcgggcgcagggggtacacaggagctttaccttctgctcattttgctgtgaacctaaaattgctctagaaaataccatccattaaaaattaaagtcattgaggtcacaaagttccttcgctaaactgccccaggtcctcagcagcctccatgcctcaggactctcctgtgggaggccttcctgggctgcaccaggggcctcgaagctgcttccaatactgagcctcagcatccactccagggcagctcttcccagcgccgacctcccagccctccgcgtactgggagctggcattcacactgcacactgccgggctgctgtgctcaccacctgccctcggggagctctccaggagcaaaagtctgtctcaagtctggtccaggatggcactccatggtaaaacatcccacccctcccgtgtcaagcccacttctgccactctagcagcacgtgtgacagctcagtctttccaatagtgaggacaggcttttccctacggtacccagtccccttgggacacagacagctggcatctgtgagcagcaagtcactgaacaggcagagtatgaaaccacgaccaaaccagacggtcattcaacaaacactaacagagtccatcgccctgccagccagaaaatcctgagaggtggactgagggctgcgaggggccagggaccaccaccaggagcggacatggcagaggccaggctgggggtgccgggcagctctgcagccaggaagagctggtgtgaagcctggaggtgagggtgcataagggctgagagggcacggccagagcacagggtctggaggctgctctccaggcaacaggaggcaggagagggatctggagtcaacgtctccctggcacgtcctccgcagggaaatggcacagcctgagcttgagtcagatgccctgactgagacccagctccagctgtgcaactgtgggcagctttctcaacctctctatgcctgtagcatcttctcacgctcatcagcacttgacgtcatcacacacacggacattttctcttggtgtttgtggtcagtctccctcctctagaatacacgctcccaagagcggaagcatctgcctcattcaccatggcatccctggtgcccagcacagtgcccaacacacagggcagcagctaacctcacagaaggaccacggagctcggcaccagcgcagaaaggccgacaggggcaggagagtcaaggccaccacagggatgtccacaaggcactgacagggagtgactcaccttaatctgctgctcgtggtctgctcttgcttcttggctggcctggagttcctggattttctgattggcttcctggcattttctattgaaagaaaaatacatcacacacagaaacaggcatgcggcaaggccaacaattctcctcagcctgagacccgccccagcacagacccacatacgttcattcccaccccaaggttcaggacctcccacggcacagaccccccgccccccgccaacacacactccactgcatgggtaccccaaggtcccaggccccagcccctgtgggctggctctcaggcctcagtctgctcattcagacggggtgcgtagtgagcccaggccacctgcaaggacctctccaacagtggaacccacagctctcacctgcctgcggcaacccccagccctggtgcagctgcggtagggccccacccaggaatgacctctcctctctactacggaactagaactctcctaaaaccacatctgctgatggaagggtccaagtctgcaggagatgcccacagtctcctgactgcacctccagacaaggctctcacgtctgtgcctcggctcagccctgtgcctggacatcccttcccagccacgccccctccacctccaaggcacatgatgctgccctttcaacctagccctcagcagggtacggcggctcagcctgggatcccagcactctaggaggctgaggcaggaggatcgcttgaggccaggagctcaagaccagcctgggttacaaagcgagaccgccatctctacaaaacgttttttaaaattagccaggtgcaaaactaatcccagctactcaggaggccgaggcaggagaatcactgaacccaggaggcggaggctgcagtgagccgagatggtgccactgcactccagcctgggtgacacagcgagactcaatctcaaaaaaaaaaaaattagccaggtgtactgcacatgcttgcagacccagttactcgggaggctaaggcaggaggatcacttgagcccaggaggttgaggctacagtgagccatgattacaccattgcactccaggctggacgacagagtgagaccctgtctcaaaaaataaagtaaaatctggctctgcaggagccctctctaagaaggagggggaggaagttgctgcccccattctgctccaggaacatcaggacactttctgggctcacggtcctggctccagaggcctcagcatctgcccctcttgagtgtctgtgaattaggacagcatctgggagtgtatccacatcccacccagccaccaggagagaggtgggacgcatgcccccacacgtgacccgacccccgaccccacaccctggccccgcccacttgtgttgcaggtccagctgctcctgcagctcctgcttctccgactccaggcgcttcacccgcatctcctggtccatcacgctccactgcagttccgagatcctccccttcagtgcgttgatggtctaaaagtagaggggaccagagagccgctcagtgagtggagcccgtgcgtggaaggagcctgcacatggagatgagaagagtggagaggcgacaccacccacgtgctataatcagggcaggaggcagaggggcagaggaataagggggcagaggggcatcgggcagaggggtaggggggcagagcggtaggggggcagatggcaagggggcaaggggggcagagggcagggggaagaggagcaggggagcagagggccagggggcagagccacctccttctggaggatgcaggtcaggcagacgctcacacgcagggcccaccctcctcctggtgctccagagcagcacagcccagagcctgccacaagccacccaggagctgacagaggagaccgggccccagccaggggccctggaaaggaggcttggtgaggcggcttcagaagcaaaagcctccaccagccaagatgggcccggactctcaggcctggcacctggcagtctctgtgccagtgccccacgctcccaaagtcccatcagacatccacatacccgccacaccatcacttcggtcttccctccaaccgtggctcctgtcatccctccctagccaccccaatgctaccatgacggctgtttgctagcgacatcgccctcacaccacagcaaggcactggccaaccaacaggacaaagacggaggctgtgcaaggggcagggcggtacctgctggggaggccgtgcgcttggaacgggagcacgcggcacgggcaggagcgcccctggggaggcggcccctgagcaaagccagcagcccctctggcagcctccaggacagcaggtctgcctgacatcatggaacccgcacgcgacagaaccgccaggcttcctcctgaccactcccaccaggcgaccttctgaggaccctaaccctctggaaaagctcagaaaaccccaggtgtcctcagagaaagaaagagcacgtgggtcgagccaatgtgaaaagccggacagaccctgagaagcatcactgtaagttaacacacggaaacacacgggcgtgatgtcagccctggggaccacgcacccaggacaggacaatggcaaactcacacagcaaacgacctgggtgggcctggctgggcggcaccctccgcaaacaaggaggcctcagcactcatttccctgtccctgagaacgtgcccagcttagggcctgctgaagcctatcaccgctgtccaccccacgccgctctgggaaggcccgcatgggggctgcgtgctccccacatgcccacaatatgtacggtttacttcaccacaacagtgaagcatcaacctgggagtcaacaaagaagaaaggtattaaaaacatactaacaataaacacatcctcccagaggtcttccgaactcaattaatacgcaccgtgtgccaggggcaaggccagatgcagggccgagcccacctgcccacagggtcacccgtgttgtaggggacgccggacagttggcaaggaagaggcgcataagataattccagagtaaggagcgtgacaatcaggaccctgtgacaggagaaggcagtcaaggcctagtgcgcagggagggcttccctgaggagcggccacctcggcttagacatgacaggccaaagcagcagcacctgcagcgccaccatcttcccctcactatgccccaccccaccgggcaccgccctgcggctcctgcagtctcctgctcctctgcccctcatgaagtgctcggcacgactcaccctcccccatggaaccacaggtgcccgcaggcagcggggacagcccccggcccaactccagtacagcccagcacatgggaactggaacccagagcatgggcaaggcaagagcagcttctcgggagccaatcacgcctcctctcctgccaacgttccctccagaagcagataggggaacagcctgaacacgcctccccagcacggccacaggaaggacccgcggccagtttctggacccctccaggacccccgctgcacgcccaccccacccctaccacgcctccacccccacaccagcagattttcatgtttcctcttggcaccagcgatcttgatcgccacagacaaaggacaggagaggtcagaagattccaatttccaccagtgcccatgtctgggctgtttctaaaatgcaagcaaccttcaccaggactgcagttcacacaggctccagttcagaggcaattatccgacgccatcagatgcctgtagaccttgcagacagtcaaagatatgcaaatccagacgtgcctccttaagcctcctgacaaaacaacagctatttccagaaaagaccaccatccacgacagggaaggctacggggaaattggagccctcagccaggcctctgagcacaacggctgcagagaccgccatcgctagggaccttataacccagtcctaggggtctgtccaaagtcaacagaagcgagggctgagggaagggctacctgtcgcatacatacatgagcgaacacaaacacactaaacgtccacaaacaacaaaaaacagattcatcatccatttaaattcataattacaaaggcaaaaaagtgcttaacttttttttttttttttgagacagagtcttgctgtgttgcccaggctggagtgcaatggtgtgatctgagctcactgcaacctccacctcctgggttcaagcgattctcctgcctcagcctcccgagtcccacaggctgggactacaggtgcgcaccaccacgcatggctaatttttgtatttttagtagagatggggtttcaccatgttggtcaggctggtctccaactcccaacctcagatgatacacccacctcggcctcccaaagtgctgggattacaggcgtgagccaccgcgcccggcccaaagtctcaactttttaactgaaaactacagaatggaaaattaatacttctactgatgacaactatgtacaaaacgcagctgcccgtgtgggaagcacaagtgaaaacacaagcgggcactgcagtggcaaacaagagcatgcactccctctcctcgggaaaacagctccctgcgcagcagaggccccgctcacctcgccagcctgggccagactgtcctctttctcacgcagcctcttgctggcagcatccaagttctgctgacactgcctgttgcgctccagctgctcctgcatcttctcctccgccccggcctcccgctcctgaagctgccggatgcgcgtcaggagctcctggttgcggtcgacctcacgctgttaagagagcaagagtcagatgccacgtgccgcccacgggagggtcagcggggagccctcacccccacacctctctcagaacatgccgaggcacaaaaaagagccgagcaggacccatgagccaagtcataggcagaaccaggacgggacctgggacccagccccagcgttggcacccccgctgtggcaccatgacggtgagcactgtgcgaggtcagggctcccaggaagggcacttggcacagatcacacacacatttatcacaccgtctgctcagcagttgcctctgcagggagagggggcatgggaaatctaaaattcagcattgaccttggggagaagctgagctttcatagcaccagcaaatcctgtctaattacgctctgtccggcactgaaaggagctggcactcccccagcgagcagacaacaggggcagagacaggcagcgtggacaggaggctgtgggcagaagcagtttacactgggctcaaatctgccacacatgcaccccctctcacacaaaccacaaacctccagacccaccccccacgactggccttagggaggccgcgtggctctcactggttgggatgggacatgaccaagcaccacgctcagacctcctgactctaatgacccgcaggccctccagagttcactgccaggtaccggcgtcccaggaggtgaaggcggtgagtcctggtggagcccggcactccgggaccctctcaccctgccttcctcgggaagcaccaagcactcccggagccccgggtggagtacgagcttgtgctgtcctcatccagggtactccagcccaaaacccaggagagctgtgacagaggtggccgccttctgagagaggctgacccgcgcacctcggagggactccagcccttgtgagctgcaagggctgcctcacaacaaccaagagacccttctgtgatgcaggacaagaactggggttggcacggggctccgctcagcaccatcacagccagatgcggcaccgggcctggaactgccagtcccagcgcagacagggcagccagcaggtctttggacttcagacacttaagtctcgcccctaataggtatttccaggtggaactccaaggaacaattggaaaactactggttctgactgttcctggggtcccatgcagctgtgtctgcgggcaaggaaggacagtcctgttagaaggtggctggagctcagcagggagccccaggtgtaagcccagtcacctgcatccttggatttccccaagacagggttcccggagaccctacaatgacccctccctcaatccaacatttgtgagcacccataaaatgccataagctgtgccacacaatggagatcctgggcagagtcgggtgggccctgccctcagggactctcggcctagaggaactccaacagctgcacactgtccctcctgcctgacagccacagccataccatcagcatgctgcctccagaccaatgacctggtggctcctctccacccctaacaagggaatctcagtagttagggagactcctgtggactctccctccccttcccaccaattcctccagtactgtccctcctaggacccacccaggccatgagcaaacgccccacctctcagggaaaacagctctcaaagcagcaacggagccaaccctgaggcagtggcccccaccccagcggtgcctcagtctcactgagcccacacaacgcacaccgcagtcaggatctgcaggccaggggcaagcaatccaaccagcatcacaccccggaagacgtgagctatttttctagggcccaggagagtgtgtgaatacaccgcatgatgtcagggcggggctggacatccacccgccaagagagggcacggaggccagggagactttccgcccaatactctgcctgaaccttggcagcatttccacaactgatcagcactgactgaaaccctggcaaagtgctgttaatcagagcagaggggatccgcgcactcagtggaaacctaattccctccccaaggacagggtgttttccctgctgccctggggagccaggagcaacacagagccgccattgagaccggcaccctttgctagggccctccaaccccaagacccagcatggacccgagaccctgatccaccccatgacctcctaagcctgtcactcctacaccacttggcatttctgccagacctgcattccaattcttccagagggaagaggaaaccaggagacccagcaaaagaatctgtgccagcaccgcagcctcaatgaacagacacagcaagtgttcccatttcatgccaccctcctctaggacatcaagcataactgatacctgccccacagcatgagtggcctcagaaggaatgtcctggcaaccatgacacagggcgtgtcaggcttccagccagctgggttctcatttcctacggcctggcaggtaccgtgcacagcccccttgctcccagggactgggatctgatttcttaagacctggcaggtaccatgcacagcccccttgctcccagggactaggatgtgatttcttataacctggcaggtaccgtgcacagcccccttgcttcctggggctgtctgggccgaccctcgccccgcctgaacccacctcgtagttcctggcactggtgctggctgctctctccagctccactcgagccctcttgtgactcagctccatctgcattttctcccgctccacctggatgaggtgggacttcgaacggatctgctctgctctttcctccagctgagcaggtcgcacccaaagaaaaacagaatcctcagtgacggcatcaaaccaggtgagtgactcagtgcagcagacacactccctgaggacccattcccgcaggtcccgtgctaagtcttgatgtggcccagccactgggctccaggctggggaacaggggaggggcaggaaacgggaaggtgaaaaagcctgggaagaggaagacgtcttttgagatgacattaagcatattagtgaaggcaacggcctcgaatgccacccatttatttaccagccaacggctccgtgggtcggaagtccagacgtaggtggctgcattctctgaccagggtctcccagactaaaaatcaatgcagtcggccaggacatgttctcacgtggagctcagagatggagaatgaggtctccttcccgactggctgccagcccagtacagccatcaactcctaggtgctgcccacatcccttgccacacggccctctccatctccaaagtcaaccacgtccaatctccctcatcaaatccctctcctgctatgtctcttgactgctcggcctcggacgtctggactcagacttaaagggctcaggtgagtacatcaagcccaccagggagtggatcaagcccacccacgtaatctccctatctcaaggtcaacagatcttagaccttaattacatctgcacaatcccacagcaatgaaacctactcagtattggactgaaacctgggaggcagtaggaaggtgagtgtgcacaaggagcctggaatctgggggccctctcagaagcctgcctaccacacagggttagtgattacaggtgagctgagcctctgggggccctctcagaagtctgcctgccacacaggactagtgattacaggtgagctgagctcctgggggccctctcagaagtctgcctaccacacagggctagtgattacaggttagctgagcctcaaagagccccagaagacttgccaaatagttccagagccggcctttgggtacgacctgctcagctggaggaaaaggcagagtcactgactcttcacgtggcccagagccttgcagtgcagcatctcccggcacttaacaaatgcagagtcgcagactacaccccagacctactcagtcagaatcttctctttaggttgggtgtggtggctcacacctgtaatcccagtactttgagaggccaaggcgggtggatcacttgaggccaggagttcaagaccagcctggccaacatggggaaaccccgtctctactaaaaatacaaaaattagctggtcgtggtggtacgcacctgtaaccccagctactcaggctgaggcaggagaatcgcttgaacccaggaggcgaaggttgcagtgagccaagatcacaccactgcattccagcctggatgacagggcaagagttcgtctcaaaaaaaaaaaaacaaaagaatctaggccaggcgtggtggctcacgtctgtaatcccagcagttcggggggccaaggtgggtacataacttgaggtcaggagtttgagaccagcctggccaacatggtgaaaccctgtctctactcaaaactatgaaaattagccgagtgtggtggtaacgcacctgtaatctcagctactcgggaggctgaggagggagaatcacttgaacccaggagacggaggctgcagtgagccaacattgtaccactgcactccagcctggatgacagagtaagaccctatctccaaaagaaaaaaagaaacttctttttagacacattctcagggcgttcacatgcacatgaaaggttgagaagcaccagagtagagtggtggttcccagtggggtccagttttgcccctgggaacatctggccctgtctggagacacctgattgtcacaggggggtggtcacatgtgtctgctgctggctggcgtccagggggtagaggccagggaagttgttaaacagcccacaatgcacaagaaagtcctgagaaaaaagaattacccagcccaaatgccaagcgtgccaaggccaggaaagcctgggacaggggagggaagtttctctgtcctcccacctgtgttctctggtggcccaagcccacacttcctttactcctatgttactgtgtctcgattctcagctgctgctgtttgggcgttcctaagactgcccttcaaactcagcagccttcctggtctcacttctgtgtctgcagtcaagcctgagcctctcgagaagggtgggcaccccgcctgcagggggcacgaccggcagggaccaggagtcccagacacacctgatccgtgtgccacctctgcctggagctgactacaacggaaagaaaggaaccctgaaagtttacccttacgttaaatcaacacgatgtgtgagaaaccagacagcacacattcccccggcctgccatgttctccaggccctccctgccacgccgggggctcagcaggagagagagaaccacgacgaagtccaggaatgggatgtgacaggggccagggaccaaggctggtcttgccgccatcactccgctcaccaccttgctctgactaccgcactccatcactgatcccctcaccgagaggcctttaccagtgagcactgggggcctccgagccccaagacagactctagaatcccacagctttgacagacaggccaagaggtcccagacattcgcaacactaaaatcacagcatttcagaccagagttgccaactctgtcacccgggctggagtgcagtggcgcgatggctcactgcaacctccgcctcccaggttcaagcgattctcctgcctcagcctcccgagtaggtgggattacaggtgcccacacccgcctaatttttgtatttttagtagagatgaggtcttaccatgttggtcaggctggtctcaaattcctgacctcaagtgatccagccacctcagcctcccaaagtgctggggttataggcatgagccactgcaaccagctcagagttggccacttctcattttgtcagtgataaaaaacaactaccatctattaccttcataatttcacaaaagaacatttacataaatattatatatatacacacacacatatatatatatatgacctaatctcagaataaaaaacagtcctcatcaagaaagggcagtgagcaagctagcaactagcattctttttttttttttgagacagggtctcactctgtcacccaggctggagtgcggtggcgcaatctcagctcactgcaagctctgactcccgggttcacaccattctcctgctccagcctcccgagtagctgggactacaggtgccacgcccagctaattttttgtatttttagtagagacagggtttcaccgtgttagccaggatgatcttgatctcctgacctcatgatccgcccacctcagcctcccaaagtgctgggattacaggcctgagccaccacatctggccacaagctagcattctaataaacacacattaattcaattatgcaacaaaacaaatgcacacgcacacacagtttaaccaaatgcagcagggcctcatctgggctctgagagcgcaggaagccagagcctcctctaatgcggacagaactacagaacggctctggggaccgcagcagggactgggaaagagggtccaggcagaggagcctagaggagcctgcgcagccacagggcccaggcaaggctggagacactactagccagcactccactccccaccactccctacaacttgggggccccattatcgcagccccaactgggactgggctcatcactctttggagcctgaagtccttcaggaggcctgaatcctctgcagttgtgtctacagtgagaaaccccaagaacttgtaatgaaacaaaatacaactattttatagaagaaaactgtaaaaatcaccccaaaatctgtaaatggccctccacagtctgagaccacaaaacacccagtccttctgctcactgctgtggctttgtctctgggctgcccaggcactctcagcactgtgtttccaacacagccttcccgacagtcctggtgctcactcccccaggcagtttgggttctgtcctcaattagatgaatgaactggctttccgatcctgtcaccagggtctgtgagtgcacttgtgtgaacgcaatgctgagcgccaggcccactcagggcgctaacaaggcaggcctttaagccaggatggctcagggccccaactagcctccagctacgaccccaaaatgaggagtgcccatagtgagacctgggagacgaatagctgtctctaggctctgctaataccgacccacctcaactacagaagactggaagaggtcctgcccgggcccagggtctccccagagcagactcccacccaggcacatgccactcacctgcatgctctgctggtactgcatctgcagagaacctggggccgaggtagaaatatccagtccagagcctccctccacacgctgagagatgaagttgttcaaagatctcagggtggataaaaccatggtgttttcccccaggtcttccatggttgctttccttccggggacagacaaaggactggtcaggggcagcctttccacgtgccatcagccgtgcagtcagcagagcctctggacagccccactcccctaacgcacattggagctcataatacacccatgcctgtaaccacattcttcaatggcaactgggagccatgctgccaatttaccagacaaaaaatggaagcaaggaagcatgccaccaaatccccaccagcaagccaccaattgagtctcagttgcacatggacagatggacagctggcgcccgggaggcggggctcagcactcaggtggcacgtcccccaactgcactgtaagagggttctccagagacacagagccaacaggacacagagacagacacaagagaagggctttattggggaaactgactcacgcgattacagagactgtcccacaacaggccgtctgcaagttggagccctggaagcctggcagtgtgacacagtccaagtctgaaggcctcagagccaggggtccgatggtgtaattctcagttcgaggggctgctgggacaagtcctggagaccaaaggccggcgagcttggagtgctgctgttgaggagaggagaggaagagtgtatcccagctcctgcaggcagatggacacattcgccttttctctgtttttgtcctctccaggcccccaggctcttagatactgcccctgactctgaggatggatcttcagcacctggtccactcagactcccaagctcatctcctctggaaacaccctcaacaggcacacccaaaaccaaaaatgatgctttcccaggtttctaggaattcctgaatccagtcagttgatgcctgaaactacctaccaggagcactcacagcaaagtctggcctcttgcccaggcagggtggttcacgcctctaatcccagcacttcgggaggcggaggcaggtccggagttcaagaccagaatggccaacatggcaaaaccccacctctaataaaatacaaaaactagccgggtgtggtggtgtgcgcctgtaatcccagctactcaggaggctgtggcacaagaatcgcttgaaactgggaggcagaggttgcagtgacctgagaccgcaccactgcactccagcctgggtaacggggtgagacagtgtctcaaaataaataaatgaatgaataaataaataaataaacataagccaggcactgttgctcatgcctgtaatcccagcactttgtgaggccaagatgggcagatcaccacaggtcaggagttcgagaccagcctggccaacatggtgaaaccccatctctactaaagccagatgtggtggcgtgcacctgtaatcccagctactccggaggctgggacaggagattttcttgaacccaggagatggaggttgcagtgaactgagatcgcgccactgcattccagcctgggtgccagagcaagactccgtttcaaaaaataataataattaattaaaaaaaaaatctggcctctgggaatcagaaacgaggcatgcaacagtgacagtaaagatgatgatcatcacagctgtgctcattttcattgtttatttctagtgacattaataagtactactactattttcaactaggtatcagaaagaaaggtatctgacatttccgagcaccgagacttcttgaacttcagtttcctcatctgtaaactcatgacagtgaaatctacttgcaaagttgtggggaacggggccaatatccctcaagtcttccaccgctagatgatgggaatacggctgcaggttgaccagcactatatttgtaagctcagtctcaacagggtggtgaattaggtctttttacacagattctagagatgatgaaaccgaagcttcaaaaagttacagaacggagattggaacttgggtctgtctggctttggaaggctgaagacaaaccgcagtaaagaactttgcacccccaacaccggcgcttactatgggctcatggcaggccggcccaccagccacaactagggaacagccaagcgcgtttaaaagccaaaggtagaacttctgcagctgcacagtttctgagtttccatttaacaagaaccttggcctggtgcaagcagaggcctgagctccccaggctgccagccccgcagaggcaggcccgcctggaaggaggctccacagcccaattcctccattgcccaaacgagatcagggtggcccttgccatccccgaggggaaaccgggcccacacgcccccttcctgagagcggaccggcgcgagccaccaggatgccaagagcccctgcagccccgacttctccaccaggcgccagctcaggccccttcctcggcgcgccggcaccctagcccggggacccacacggtaggcagcgggaccccggggctgggaccacgagcacgcgcccctcggccgcccgccctggcacaagggacggctgcggagacccaggcgaggggcccgctgtccccagcacagcccaaagggggagtggggacaggggagtggggagaggaggggagagcacagagaggagagcgcgcccatgggagacggggcgggcgcggggtcctgaggcacggggtctgggtcgttgtgccccaccctggcgagcacacccggtccgggccctcggcccctcccttgccattcccgggacccccgggaccccgggaccccgccgcccgcgcgagccgggccgcttacctcagccgctcgcagccagcttgccgccgccgctcggatctccctccgctccgccggcgcccatttatcgcgacacttgcgcctgcgctctcgcgagacctgcgtggcaatcgggccgtaaagaaccgagtctgcgcaccggctgatcctggggactccgcgtccgcacccggagccgccacccctgggagactccgcacggaaaggactcggaaccgaaggctgagccaaggcgcagtcgggggccccccggctttgcgcaggacgcgcttccactaaggctttcgcctcgcgccgtaatgtgtggaatagccgcgcccacggcagcctcctcggacaaacttgcaccgttgactcttcccaaaattttgctactcagtatcagcttgaatcaatccgttattttgcttttttctgggcccactagaaatgcaatttatgctactaggctaccttcccagtgctctgcaagccagggcacagcatccaatggggtgaggtcaggccccaccattattatggtaacctttgtctatccttcaaattggagccttcctgagaagagtgtgccttactcgtttccatattctcttcctctcctcctcccgtctctgcccagcccctggcttccctctaagaagatgctgttcctaagggtctgcaatgaattttccttctttcagagaaagacttccaagttgtgtgccccgggaatgaaatggaataagagaacgaggtggagtagggcaagagtccctggacttaacaacctgactgcaaccagaaataaaatgaaaagtcaaaacatctggcggccgggcgcggtggctcacgcctgtaatcccagcactttgggaggccgaggcaggcggatcacgaggtcaggagatcgagaccatcctggctaacacggtgaaaccccgtctctactgaaaatacaaaaaaaaaaaaaaaaaatagccgggcgtggtgatgggcgcctgtagtcccagctactcgggaggctgaggccgaatggcgtgaacccgggaagtggagcttacagtgagccaagatcacttcactgcactccagcctgggtgacagagtgagattctgtttctcaaagaaaaaaaaaaatcaaaacatctgacccgcagtttccttcggggagctggacagagccccagattcctgatggagattcctgggtttccagacttcccccactggtccttggaatttaatcatagtcaacaaactcttcttgagggatgagtacacctccaggaaatggctttgaggaagccagtttaaaaaaaacaaaacttcaaagcatgaaagtaccttaaaataatgcaatctctattattttattaaatataaagctgcgtcaagttcctagatgagtaaaagaaaataaacacaccacatcactgcttgctttggcaattacatttatgttcttgggagcccagacactgatataaatttccagcaaaaaccaaagcagacccactgcctggataaattcagaccatacgtcttccctaattgttccgggaacttttgctgcttgaagaatgcgtgaattgcta

SEQ ID NO: 350 - DNA, 367904 bp, Homo sapiens
  source 1..367904: mol_type = genomic DNA
actgggaagtgctggcagatatatacagtaacatggaggagccatacaacaaaagcgtttatatgtacatcattttttttctttttgtatggagaaatgctgccttataaaatcggaaaacacacagtagactacatgcaacaaggaccaatacaatgtgcacagcagaagaatcaaataagacacaagaactatgggtttaaaaaagaatttgggagcaggacaaaaaacaaggattgaaacctggaatgctttcttattgaggtttcagaatataaatttgtctaacaagcctcttgatagttttcaaaagttcccactcaaccacctatggtttaagtgtagagctaaaaataaaccatcatattatacaaaactttgcatattagcatacaaaaggtagcaatttactttttgtataaaatataaccttttgatagtatatttatttcacatatgtataaatataacccaaagaatatgtttgaagtatttctaccaaaatattctttacaaaagtttacaaaacaagtaatttatttatatttacaaactagcacagggaagattctgggccagtgatgttggtattgtaaagaaggagagtgcttccagacattttaaagactgggagacagctttgcagaattttcaaagtgtgttctttttctttgaacagatattgaaagacttgattattaaataacttcagctaaattacatttgatatttgaatatgtgagcatagaactgaaagggctgaagataacctttgctcctctgtaattaggaaaatgatagtgatattttgcattcattccaaatcagcacacgtcttccccattttacagctgatctggatgtggacactaaggttaaatgactcaacaaaaactctttaatacagtgctcagccctgagggacaaaacctggatatgaagagtccatctagcatgtggcaatgattcatcacatcagggacaaaagaacaaacagaatgctcctaacagaccacattccattttgttgctcacccaaatccaaataatacgtccaatgaaggacaaattgttttccctcttgattatgcgttccttcaaactccgtgaaatacatttgtacacactggtacttgccatccctggttcttatctccaaccaaaacatgatattttctaatctcggttttcttctccaaacttccttttcttataaaccagcctcagtcatcaaaatgagtagggaggacgaggttcaatttcactcagcttgggaacaaaccagcaggcatcaatcataataagcaacatcccaggttatttgtagccaaataaatcttatttatagcaatgtccactgggttttttaaaaaagtgaaatctaatgcagagaggtgtgcaccaatatttcagtatgattaggacaagtctttgttatatctaaaatttcatttggaatggattcagatattcgttgtggaagccaaaatcaaattgcacagctctatatttttgtttaatcactagacacagcatcccactgaagtagaggattgtgggaaaattgtaaaagtgaggagtgaatatggggaagaaattctgtaatccactggatgttttctaggttctctggctttttcttaatttgcatactgtttggttactccaaacaaacctataacatttcaatctatcctgcaagcttcaggaaaattaaatgaaaagacacaatggaaagattaaaccatacctatctattagagcaaattaaggagtttgttgcttggaactagtacctcctcatgacatggggtttaaataaactacaagttctattaccttttttattttccagggaaaaagaaacttgggaaggctattttacacaattaattacacattgacaccacagttctgtttggataaattggatactgtatcctggagtttagacagggaaaagtgatcccaatattttactttcaggtgtaagatttaaaacaagaatttggaccaaaatgttcatcactgcagttactttctgctttccatttttaagcatgttatcttcatgtagtccacctgaacatcaacagttcagcctctacagagtttctgtaatatactgccttttagtgcttggagtttgtaaattgtcttccctttcttctttaggaattgttccccaagatttcatcaagattgatgtctttcatccagtcatcattaccaggctctgtcttcaataaagaatcaatgaaatcagcatcactgtttagggcagggcccatgttatcattttgttggctgaggaagtcaaaagctaagtcactgctgtggtcagttccttgaaaagccctggaactttggttgggtgaaggaaaattgctgggcgtcagggatggtggctggttgatgcccgtcctcgactgattcaaccctgttcctgactgattcaaattaggcaaaatctgtgtgcttagctgattgggtctgagattcagacccctgaggggacccatggtttgcccatttagtgtttggctcatttggttcatgggtctcatttgcactgctggtgttaactggttaggaggagccactgccctctgggaaaattgctggctacctactgcctgttgcagtgactgatttggggtataggctgcaggtgtacctgtggggaagcggactcctgcagacgtcagggcttcttgctgtttgcttgttccttcttgagaggcccagtttggtgcagttgtgttggatgtgatcattacgtttgatgttctctgtggtggcatgcttgccatactatgggttaaatttggtctcaattgttgtgaattaccaacagatccagctccaaaagtggctacattgttattattacttggccctaaggtaggtggccgtggcatcatagggttgttttgatttgctaacaattgctttgggtttctctgttgggtcaattgattcattcctgaagtgacactgtatgtgttaggttgattacaaggcagatttccatacatccccatattctgaactgctgtagataatgatggcattcttgtcccgtgagaagtagacaggaggctggaattgggagttaaaatggtgtgtgttgaaactgggtttgccaaagcctggttagagtttaagcttattgtggatgagccacctgagaaaaagaagagaattttattagttcgtagcagcatgttatctcctctgtaactgcacttttcaataactcatcaatctgaaactgctttcaggtgtaagacaatttaggcgaaataatgatcaaataaattatataaaaggaacaagacagctcttaggaggaaggagcacctgaggtcactttttggttcagaagtttacatattacaaaaagaagactaaaatagaatagttctatcttgtaggttttattttattcctcttctgaagtcattgaagggaggtaatagtcaatcttccattttgaattagctttactatgttccaagtccagagactacagtcttgattagtcagctctcatgaaatccatgttactgtttaccccaggtccaaatgagaaagtgtggatgaatgctacacacggctcctagattaatattcccaaactatggccttgaaaatcatgtcccattctttgaatcatccccattcaagaagctaccccagtgactccccagtgttcaaagggtaaatctccatctctttaaacatctggaattcagtgctctagaaattatctcataaagaaattcttcagttccaggaggtgtagttactatcaaattgttactcaatgcactgtgagccacctttgcttatgggatttcccttcctcactgagccctatattttcctcaaggttcaggctaaggccgaagctcctccattaaactttcttttatcttccagcctcctctctccagcagtatttgcccttcgaatctttcatttaacacttagtattgggcaatctgtggagtctcaaagtgcctgccagttaaactgatgcctgtcaataactgataggatattgacagagacccaggaggcagacaagggtctcccccacgccttcaaacctaacacagcctgaaggctgaaaaactggactgctggtcctggatgaagaccgcttccgactgactctttctgaataatgcccacctgtgcactgggaagacagggtggagccttgggaagttcgtgccatttgcagcagtgaggagcctggcctctcctgttcctgtgtggtgacctggaattcaatctgtgaggtgggaaacctgctagcaggactctctctcactttgctgagagttatttttcctttttgccgaataaattccatttttcctcatccttccatgtgtccacgaacctaatctttccttgccatgtgacgagagcctggttttagctgaactaaggagaaagttctgcaacaatatggaacaagtgcctaagccacaggctgtgtaataagaggctccacacaacagatagtgactaatcaacatattgaaatcttcttgacttctggaggttaaagtcatcacgaggaaatatttttggaggcaaagatgatcagggaggcccagagagtcagagattctgagaaatacagagctaaatacacataagaatatcacaatgtcagtggatggggagagcatgtctgcaattgtaaacgtgggctatcccctgctgcttaaggatacgtaggtggtatacatcctgaaaaactgagggccaaatgaacacagtagctttgctatttatttataaatatgcccccaactagactacataccccttgaaggcaagaacagtctcttgtatctccttgtatctgtgtagtgcattgtgtagtgggcagtgtttgatgaagagacataacagccaggtaggagacacttgaacaataactgagatgacatacaatgccagtaagattcagcaatatcatctttgtatctgaaagtttcatatcaagggaatttatattatgaaaatgctgtggaaaaaaatgtagaggttttaaaaattatcacctgtagtcgccctgtattttaatgatatggcctgagaaggtttataaggaaaacaatctttttaaacaaccagaatagagagaatttccacaaagatcacaaaatagtaacagttaatgtttaaaagctcctaacaggtgacagagactgttccaggtgcttttcatactccatttttaatatcaaaatctgggaaaggtaatcattattgtaccaagattaaaataaaaaatgattttaaaaagagtttgtattgcgttttgttgcttatttcatcatcagaagacatgggaaacgcaatgctctagaataatgattctgacccacttgagtgtcagcagttggatgctaaggatttctcccttagaaaaacaccaatattcactgtggaagagactgctaggtgcctacccaatatccaacctctctatattccttcgaaacagagctttggttttagaaacagagccttctttagaaacagagcaatgtgctcagctgaaaaaccacattccccaaacttccttgtcgatggggtgggcgggagggtccaggtgaatatgttctggctaagggaatcagatttcttttctttcctcttcctacctggaatacaggtatgagactagtgatgtggtagctaccaggcagcccttaggatagaagccacatgctgaaagagatggagtggaaagataaaagatgcttgaaatccagcaagccagccctagactactgtgcctgggatccttttatgtgagtaggaaaagaaaaacctcaatatccaccttgaattgtgtatagtattccaaagggcgcccagctttttcaaagctcgctcataggccatggtattaaaaaaccatgttttaagtacagtatgcactgcataacaatgtttggtcaatgaaggactgcatgtatgacagtggtcccataagattatagtggagctgaaaaattcctatggctgtattttagaggacactctaaaataattattaaatgcattcgctcaccactcactgacacccagtgtgactttcagtcctgtaagctccattcatggtgagtgccctacacatatgtaacattttttatcttcctttatcatatataaaaagcatagtaaatgtttttactatgctttcaataattattttggagtgtactccttctacttatacaaaaagttaactgtaaaacagcctcaggcaggtctttcaggagatattccagaagaaggcattgttatcataggaggtgacagctccatgtgtgttattgttcctgaacaccttccagtgggtcaagatgtggtggatgacagtgatattgatgatcctgaccctgtgcaggcctaggctaatgtgtgtttgtgtgtgtttgtgtcttagtttaaaaaataaaaacaaaaaatttttaaaaaattttaagtgaaataagccaggcacagaaccatacgttctcatccatatgtgtaagctaagttgctctcatagaagtagagaatagaattgcggtttctagaggtggggaggatgtggggagaaaaagctagacagaagatggttaatggatacaaaattacagctagataggaggaataagtcctggtgttttgtagcactctaggatgactatagttaaggataatttatactatgttttcaaataccaagaagaggattttgaacgttcccaacacaaagaaatgataaatgtttgatgtgatggttatgctaacaacactgatctggtcattacacactgtttacatacatcaaaatatcctactgtaccccatatatatgaacaattatatgtcaattaaaaataatttaaaaattgtaagaaaatagaaaaaaagcttctagaataaggatatagagaagaaatatttttgtacagctgtacaatgtgattgtattttaagctgtgttatcacaaaagtcaaaagtttaaacaatttaaaagttgtaaagcaaagcaaaaaaattaatgtaaaagttaatttattattaaagaaagaaatttttaaaaataagtttagtgcagcctaagtgtacagtgtttataaggtccacagtagtgtacagtgatgtcctaggcctttgcattcacacgccactcactcactgacacccagtgcaacttccagtcctgcaagctccattcacggtaagggccctatacaaatgtaccattttgtatctttttaattatattttactgtaccttttctatgtttagatacacacaaacttaccattgtgttataactgcctacagtagtcatcacactaacatgctgtataggtttgtagcctagaagcaatcagctatatcatatagcctaggtgtgtagtgggctagatcatctaggtttgtataagtacactttatgatgtttgcacaatgaaattacctaacaacgcaattctcagaacatacccccaacattaaccaacacatggctggaaactgcatcttatctttcagcctccttgagacaatcaactagagaatcctgtttttgctctgaggcgaagtaatcttagagagtggaaaacatacatcccattcctaatgttacttgttgtctttagagacagtgtctcaatatgttgcccaggctggcctcgaacttttgggctcaagcaatcctcccacctctgcctccagaatagctgggactacaggcacgtgcgactgagcccagctccattctcaattttagttgaaagaggcaacctgttgtatttgagggggtttaaataagtcaggacaacatatttaaaagtacacttaacagtaccaggaagtatttataaaataggggtgttcacagcctttctttctttagagaatcttctttatggcttcctggacagatgaaggtaacaggtaaggcagagagaacttaggaaacccaagagcgtaaacttaacttacatcaaaaagtgcagagcattttagacagttttgggcagaagcgtattgaatagttgctgaataggagaaggcagagcaatataggctgggtttgggaaaggttcttttggagtttcatgagcgggaggagagagaatttgggggacttttgtacttaccatttattttatactgagagagctattaagaagatttgctttgtgatttaaatggagttcacctttggtgtttttgagagacttcgtgaaaactaaatctgcttttcaagtattccttggtggcaggaccatttgtctttgaaggggaaaccttggagatgggctcaatggtggatacaaaaagactaggatttgtgaaagttacacatgtgcctgtctaagagggagaaatgtctgcttaccttctactacctgggttaaggtatatctttggaaggagaatgattgaacctaacagaaaaatatttagctcttttgaattctcagaggtagtccagagagtggtgaaatatgtgagtacagggcatgactaagcaaaaactgatgaaaggactaaaaaatatttaactgtagtcttggcatgaaagtcaaatgggagttagaaattctaagaaagatattataatcatatgtgagttacagggattattgaaaattgaagtttttttttcctttcacagctataatttttattaatttttaagaacacttaccagaatactgagcagttggttgcatattgcccacatttcttctttggtctttataatctggaggtggccttgacaaatgtcggtttatctgatcttgtggagcaattttctccttgagaaatgatatgaaagcatattatgttgcatcattcccttttcacttgtgaaaatacatgtaaaattttgtaaaatttcagaaaatataagaacaattttgcaatcatgggttacaaatcatgaccttattttgtagtcttaattcagagacaaatcttttcaatttcaataaacttcctgtatggaagtataatttctacttttccataacagtcaacatgtgttttggttctagtaactactcctattttctttattttgcaattcaatttcaatgagaactaaatttctgtgatttttcaagatgctaatttctaattttgtctaaaaacagacacaaacaaggtcactgtgcaacctccaaaacaccaaacacccccctctcttgttaaatgagtgatagctacttctttattcaatgagaatagcacatctgatatgctttggcaggtacctacgtagaattctggtcccacacagtggggaaagcataggaggtagggttttcagataaaatacagaacatgtaggtattctgtattcttatttgtttttgtttgtttgtttgtttgtttgagatggagtcttgctctgtcacccagagtggagtgcagtggtgtgatctcggcttactgcaacctctgcctccctggttcaagtgattctcctcctcctgagcccctgggattacaggtgcccgccatcacgcccagcaaatttttgtatttttttttaatagagatgggcttttaccatattggccaggctggtctcgaactcctgacctcatgatccacccagctcagcctcccagagtgctgggattacaggcatgaacaaccgcgcccagctctgtattcttatttgttaaatctgatgaccctaggtaggaggagatgtcaggagataaccaacaggtaccgatataggcactatatgaattttatctcttttttaccttcgcataaacaattcttaaaggtaggtatgattatttccacctaaaaaataaggaaattaaagccttgttaggctaagtaacttgctcaaggtcacacagtggtagaactgagaccaaatcctgagtccaaaactcaggctctttcctgacacacaatacgaggccccttgctactctgtttctcagctccccattctaaaagcacaggtttgctgtcctcccttcatttcttccttttggaatcagccttttgatctttagaataggtgactttggaagctaagagaaaaaaaaagagacattcttttaatatgtcaatatcctcagtcaaagaccactaggaacacagctgttggctttattacttgttgcagcaagggagaacacacatcatgaggggtcacagggtgtctcagtaggagaatgttagaaagaatctgtcctgagatttggactttgagtgatttcggaagagtctaaggaaatggggctttgttctagattggaagctgtcacaaagtaaagtcaattctaactgaataaagaagtagctatcactcatttaacaacagaggggggtgtttggtgttttggaggttgcacagtgaccttgtttgtgtctgtttttagacaaaattatgaagtgttattttgtctcattttatcatggtctcagagtaaccctgtctgaggttgacattctgtaggattgtttatacccaacagagaacaaaacagcttggctgtgagtatcatatcagctttgggaattaagggctgctttttatcttgtttggtatggatcagggagtttttagaatgacttcactgcaattttgtatgcatcccaaagcaatctcaattttcaaaataaaaataatcagcataggtagacggagaacactataattatagaaaagtcaacaaatagaaaagaaaactttgtaatagatacatgggtaaattagctggaaaacaaatgtgcactgcctaacttagaactgacttaaaccatgtgtttctcagtttcccatcacattccaaaccttcttagtagaataagtctactataaaggagaggaaaaagccttaaaacaacaacaaaccaaatttaaattcttgttgctaagaaaaaggcttgaaagacacagttttttgcacataagtaattcatataaaacacaattttgatgagctaagtgtaaatgaatcagaaacatatggattacatttcttttaaacatgggtttacaaattaagggaaaaagtggttggtgaaatgctctttggttttgcccaaaccctaaatgtttaagaaacagcttgagatgttccatgaacccaaatgtggtgatgttcaaccagctctgctgtaaactgttgtgtgagatgacagttttgattttatgccagcatggactttctgaaatccactcttttccaaaagcatctgtcattctttcttatgtaattaggtgtttctaccgtttatactgaagacaggatgtgtgtgtgtgtgtgtgtgtgtgtgtgtgtatgtgtgagagtgagagagaaagagagagataaagagaagaaggtgcttgacttcccatcatagactatattgtaaacctggatttatttttatatatcttcaatctaattattgacttttttttttcttttgagatggaatctcactttgtcatccaggctggagtgcaatggcacgatctcagctcactgcaacctctgcctcccaggttcaagcgattcttctgcctcagtctcccaagtagctgagattacaggtgcccgccatcatgcccagctaattttgtatttttttagtagagacggagttttaccatgtttgtcaggcttgtctccaccagaggctaaactgttgttcaaagggttttcatttatatatatataatatttatagtatatatatttatattatatatatttacattattatatataatatttatattacatatatcatttatatatatatatccagaaatttaggtttcttaaactactcgttcacaaatgacttagattaataaccttgcatatggacataacacagaactgccatgttgttcttttgtgctgaagagcagcaaagactagcctgcaatactgaatagagatggctacattttgcaaaagactgacattcctattctgtgcaagtgtaaacatataggccattcttgagaatacttttatgcaatatgaaatttaatttatgaactaatatctaatgataacccaatctgttggacttgaaaacccattatagaaatcatctgttatagtacatatctgttctgcttcagtttctccatctgtaaaaatgtgagatgtggataattataggacctccctcatatttctatttaattctgtgaaaatccagcttggtgcctggcatacagtaggtacacaatgcgtgttggtaattacgatgtccgttgtaataagtactattcatgtctcttctttgtgcttcattggtaggagaataatagagaataaggataacaaactttcatgagacaacgtctcaatttaggtgcctatgtggccttgccaactgactgcaaatgaccacaaagcatatgctaatgtacagtggtatcaaagaccacttcttcctggatatgctaaaaagcacagacaccctcaatggtgtccaaacaaagagaaatgtgaatggtttttaaaaatcacaaaaacagcagcctcattctcattcatctcacagtttatgccactgccctttgcacctgtcctagtggtgactcaactggggcccagtgggagttagcccagtgccaggccaggaccctcatggaatgtatatgctaccacttccttgccttttaacaagagctgaaaatcaacctctgtgtgttataattcatgaaattagtagtattgatggtagtgatgaaagtgtacccagtaagtcaaccttagattacacatttttctctctgctgtccttgtttctaagttctttagcttataaggataaaaatgggaggggaagggaacaggggggaggactggagttttcaaaactatgatttctagaagaaaccagttgtgtcactttgtgatccagtctgtgactcccttaaaccttatggcagtattcaacgtcatctgtaatcttatttctcaatattccttattccaggtcaaataaatttacttctcactatttcttttcacatgccctgaatacgaaacttattccacttgtaattcctttaaaagtgtggttgttatactatgtttactttttatcaggcattaaatatttcataatgcaatctcaaactcaccaacaaattcacacccaggctgcaccttttggtgctccaccctccacctacaatagtggaccccacctactctatcagaatcctacagtccttcaaaatcaatgtcaaattttacttctttgggagactatcctcaatctttgcaggctggatttaatctttctttccattacattttctcttactttttatactttttactgtaaaaagtatacttttttctcttactttttatactttttagtatattttatacttttactataatgcaaatctgaatctagtacttccccttgtgttaaatccttaaaatctcttctgttgctttttaatgtaaattctggcctctcaagccctatcctcctgcttcttatcccatctttacccatcaattcccccttctcgtgcacactcaataccttggcaggcataatatgtagtatcctttattgtccctaggtctttgaatatgctggttgttctggctgaaataaccctcctactcatctcttactccactttcagatattcggtagatagaaagttctttctgaaatcatttctagtagttaccagagtatggcatttaatcacatgcattacaattggccaatttatctgacatatcctcagtgggctcaaggcttctctagggtgaagagaggatttgccttgtttatggctctcccctcattgcaaattattatttactgaataattatagcacttgtgataccctgcatttctgactctcactacaaagctccttgaatataaaattatttgattttgttgttatcttttctgtatactttagctctaattcacctggagatgcttactttttatttcatttggccaaatagtttgaagggaggcaatgaaaccagggctgagcagataaatactgaaggagggttaatgcatgaagagtgtgtgggaaacacaatcttgtctttcttaaacagtcaaatattaggttggtgcaaaagtgattacggtttttgccattaaaagtagtggcaaaaatcgcaatcacttttgcatcaacctaatatatacagtgcaaatgggaaatgtattttacattttcttttaaaaaatcccccattgtgagttgctttattttggaagccaaatcttggttttgaggctccatgttggcttttaaaattgcttttgaaactcttatctctaaaatcagtttggatttgagttgattcaagttcagtttactgtttctgccccttaagcctggggaacaacactggtttcttttgcctgattcaaatgcccatgttggttgttctagacattcctgggctgggcagggctggttagcagaggtgccatgcattccaagtgtccagcagttgttaaatcaagtttgggtttttttttcttcctgcagtacactaaatgtatggaattatcctctcttacagtcagcacacctttgttgctgtcacgtaagtaggcacagtaaatataaatggaaaagaataaactccctctgttgggtcaacaggtttgttcagtagaaattaagagaaagttttaccgcgtcagccagcatctgctgctggagaagaagttgctgtttctgctccatgatctgcctctgtagagtctgcttctttcccatcaattgctgattcaacagtgattgctgggagttcatgtaaccacttccagtgtttggatttgagcaggggttaggacttggactggggcctgtgttctggcctaccacagagtgttgatcctaaagaagagaaagggggaaggaaaagctactgtgaattaaaaaaagaaaaatgtagcacaaagatcatacactcagattccaaacatttttcatcttattaaagatcaaacatggttaaatgggttggagatcagagaatcgctttttaaatgtagaagaaataattgcataacacagcaaccaaagcagctgggttaatgacattagggcactggaaaagctcccatgaggactctgattgtggaacctccacattccagaaggtgtttatggaacctcaaagaaaactaccataaaaacatatggcaaacctctcaatttctcaggaataaacatcataacctaacaaatccttccttttcccaaagttagcatgtatcattgctgatcctgcaatgaaagtcatgttttaattcacgtgtttaaaagttgaaactattttggacagaaggcattttgccttacccagctttctgtgacagaaaggcaggaaggcctctaagtttctgttttataaactcaaacttggaaaggacttcacttctcagggccttgtaaattttgttccgcagtcaacaattcaggtatctcggcgcaagaatctcagtaaaagaatacccgacacactgacaatgagaaaatattgattaaaaactcaactgtatatcaaataatattgggtattggtgaactgcctttctaatttgaggtctctaccaattttttggcattgacagatcaggactctgcaagacagtaagctaaacccagttgaatattctcattaattcccaatgatgtatttaggattgagctctacactagtacactagtagggttacaagaagactagaaaatatggttatcaccttagagaatttatcacccaagtgagggagaaatgcttacatgtataaatataagaaaatgtaaaatcaaattttagtttacatgatataaacactaagtcaaaaattgttatactttgatcagaatgatctgggaatcagcttataaggcagatgccctggccttgtcccagggattctgaggctatagatcagggtacctccttaggttattctgatactcattggtccagggaatatgctttgggaaacactgaatacatgggaacaaaagaaatccaactctctcttttttttttttaagagacagagtctcactctattacccaggctggagtgcagtggcataatcatggctcactgcagcttcaacctcccaggctcaagcagtcctcccacttcagcctcctaaagtgcctgggaccacaggcgtgcgccacctggctaatttttaaattttttttagagacagggtggctaatttttaaattttttttagagacggggtcttactatgttgcccaggctggtctcaaagtcaagggctcaagtgatcctagatccttggcctcccacagtgctggtattacaggcatgaagcactgtgcccagaaaaaaaaaaaaaaaatccatctgtcattcaccaactaaactatgtaaggttacaagacataaaaacattaagcagggagttgggtgcggtggctcatgcctgtaaacctagcactttgggaggccgaggcaggtggttcacctgaggtcaggagtttgagaccagcctggccaacatggttaaaccccatctctactaaaatatgaaaattagttgggtgtggtggcacatgcctgtaatcccaattacttactcaggaggctgaggcatgagaatcacttgaacctaggaggcagaggttgcagcgacccgagattgtgccgctgcactccagcctgggtgacagagcaagactctgtctcaaaacaaaaacaaacaaacaaaaaaccacaaagcaactcccatgataccacatgagtagaggtggtaggtacactgtttgtggaaattatcttttttatttctttctctttctttaactatgtgccgagctgaaataaataaacaagtaagtaagtaagccacaagccgaaagccttggccttgctttagtaatctctgaggctacagagctcaccagctgcctcaaaagcaaagggttacaaaataattctaagggcgaccatccactgaggcttattatcagccagtcactgtggtccgtgctttacgtgatttatctcattcactcctcccaacaaaacaatgagcaagaacttgtattattaacccaactttgcagatgagaaacctgagctcagagagatcacatagctgtaagtggccgaggaggatttgaagccaggtctgtctgaccccacaactctagttctcaatcagtacactttactgcctgtcacgtgagacaggaagcattgagaagaaagatttttgtactttaaacctgggccaacccatcagttcatgcagcactcttcccagggttgagcaccctcaggtcaggaaggtggaaagaagtgtgttggagagaaggacaggggagtgaggacagggtggggagatcctcttcactagttagtaaaaaataattacagccatctctgaggtacatcctttgagcagcttaaggaaaccatcctctaatatatttacacccctatgaccagtcagttctttcaactttaaatccatcatgaatttcggagacttcaccgcctgtgttctataagccactaagaatgtggacttggagacaagtacttgagggtcattgacagaatggcaaatgaggatcggtgagctgagtgtcttggagggcaaaaggaggaggaaatacatggaggattgggggctgggccttttggtgcaccctgagtaaggacagggaagcagagcctgtgacagggggaaagaggcaggatcagggaagcgtaaagacagctggaagtggtgggggaagacatcaaggtgggagagaatgtattggagatggtagtttgctttctactctccacttgaaccagaatagaaagagtctgctcttttctttgttagtttggagttttatgtaagactttcaaaagaagattttgtgtttttttgttttggtttatttttttaagtagctgacaagcataggtagaaaaattcaaaacacttttcttttcatcttctttgcattgccatgcaatggacaagaccataagctccggagataggtccaccttggttcataccccagttctgacacttagttgtgtgatgtggcagaagttaattcacctctctaagcctcagttttcttatctgtaaaagggaaataataacagtatggatgtcacagtttccctacaagagttaggggagataatccaatacctaccacgtagtaagcacttactaaacaatagctgctcataattattaaagttatttctacacataggaacaatagtctgtttacgtttgttttcattgtgaaacaaaggagatagaactcgcagactacagaaagctgttctgtgtcaggtctctgagaaatgtagaggtctcagttatattgcagattatgagctgccagggatttgggaaattaccttcatcctcctacttgaagatgccagaagatgggtggggtatcattctctgatgggctgtcttttggggtgtgcttctttcttctcagttaggggcttagctcaggtctctgttagctttgctctttgctgttctggtttttattcttttaacatccaattatttatgcatagtgcaatcatgtacatttactaagtaccgtgccttagtttcctcatttgcaacataaaggtaatacattaattacctaaaatttaacaagatgaattttagaacagtgccagggacttagtagagatgtttgatacactttaactattattattttgttatttctgtatttttaaatattagatgttttatatccaatgagtcttatgaaggagctcacactgtaagtgtacctggactacagatgtggtgtgtttggcccccatcatgtttgaaacacaaattgctctttttgctctccaggtggccacagcagcctctactattccttactttattatacccacccattttcctcacttctatcatttgcctggtccatgtaggccatctgagtttaagatctctggcatacagtttatctgggaagataagctacacataccacacactccacatatccactcacccaaagttatgacaacaaaaagcaatgcataatcatttccattaggtggtatgatacctactagtgtcttaagattaaaacccagatcatggcatacatttacctatgtaacaaacctgcacatcctgcacatgtacccgggaacttaaaagttgaaggaaaaatcaatcaatcaatcaatcaatcaatctcagatcacctaatgcctagtcacccatgaatccatcaatccattaatgcatttgacaaagtatactgaatgtctactctgtgctaggcagttttttattttctagagaccaaaatgtacttagaaatggggaaaatgaagagaaagaaaagaggtagacagagtgctcaatgttggcagaattgatgagctccaaaataacttccagagaattctggaaaaccaaccttttctaagatttataaaagatctgcatgccaggaaaatgtaactatgtctctttctctctctaatcaaacagatagactgtgctaaatgtagtttatttccttcacggtaccaaaagatactttaggacccttttccctagggtctgaagggttttccaaatttgaaactggtgcttgggtgaagggaggtgccctggtatggaggaaagaatgagataaatcctttcttgtaattttgtaaaagatttttaaatcttgtagtttctaactcatgggttttaccatgtacctactatatacattctttgaattcatgattgaagtaatatttcactgctcttgcatttttttgcccttatgtttgctgtaaaacacaaaacacctccttatacaagcttgctgtcattgccaacatgttgtgcaaactttagtacataaaatagtttgaaagaaaaaactgctttgatgcattggcttcgattttcatactcagcctcactctttgccttaaattcaacccatgtagaacttaatagaaatcatctgttttttccccaacacacattttctcctgaagggcatatgaaggctgtggtaaaaatcgcacattctcagctgatagatgagagtatgtgtgtatgtgtgcatgcatgcatgtgtgtgattgtgaaagaattaggctatttccatctaggtagtctttcacataatagaaaacccagttttctagacaaaccgtagttaaagattgatttggcagcaaggaatagtcaatgactggttcaaatcatgaacttgcatgatctttcattttacatgttctttttctgtttttacctacaaaattacagagtttggttctaacctacaaaataggtttcgcatccaatcctcctgggttttaaatcaattatgagtgcacaataacgtatatttattgtgtactcctagatagttttccacgtttgtgagtgtgtgtgtgcatgcgcatttgagatttttaaaagtctttttatagtattagtccctgagatagtgtagcatgccagtgcttaagtatggataaaacttcttggtccctgttttaacccagcacaggactgccagaccaatgaaaacatgtttgtattctttttataaggttcaatcaatcaacctgtctttagaattattaagttcactgcattcttattcattaattcaacaagtatttattaagcattgcattcttctgggccttggggataaagcagtaaaaagatactgaagggacttctcatgaacctaaaacaaacaacatttttatgagttttagaatcataatcgcttagtgggatacacatctttttctcaaaatgccatcccaatcaaaaagcatttgagatcttcatttcaatatttctgagctgtacacaagtggtcccgagcccactctaaggcccactggtgagcatcctcttcttctaaggctttggccttgtcattagaaattcactgctctgtccctaaccactgctagtatttagtcatcctatctctgctcttttactctgagaatgttttaaaattatctcaaatcagtagtgaagatctcataatacagtcatatatatatatatttttaaaatgtttccatcctcatctgtcatttaagaagatgctagatattcttgatcaaactgctatactcaagaattttggactcaaactctatacagatactagactctttatatagcaacagcttccttatatagcaaagcctatatctacccatttatccacttttctatctatctgtctgtctgtctgtcagtctgtctgtctgtctgtctgtctgtctgtctgtctatctatctatccaccccatccatccatctacgtacccaacctccttacctgtccattctagtccaaatctccaaagtgcactttcttctaccacatccctagcaaatgatcattcaacctctgctaaaattacagaaacattcttgatgtattatttggaatgctcttcagaactccaagctgctattcttaacagcatctgagcaaagaaaatgctttggacatgatgggtttcattcattcacttattttctaaaaagtaggtactgactaagaataacctatgtcctgggcatttcatcaggtgctagagaaatggagataatttggacacagttcttgtttgcaacgcttttacctccaaggagaggagatagtcatagtcacaccctggattgtgggcagtcttattaggagggtaacaaagttcatgcagcctgctggaaaatcctgccacttgactatatttttaagttttccaactgtgctactgatggatcatttatttcctagaatggtctcaaggatgttaggagaccatttggtaaatcaggtatatgatgaccgaatcttttagcttgaggcaaataaaacatgctcacaagttaagtaagctcacaaggaagctggatgcatgttttaacttatggaaaaaaatctggttaaaaatgctttccccaattttttacttcattggtttaatatcttgcctatggatgaccatgggaagtactagctcactgaggttgcaatctatgtctacaaacctgggagacaattaggagaacacatgaactcttttaaatgggtaccctttttccttagaagacaaattacctgtcctctgtgttaattgtgtttctctcaaaggcagtttgaagtccttttgtaaaaaagtccaaattaaaaaattaagaacaaacctcactgtcccagccttctaccagtgtattcaccactaaccttttctttaaattttctgggataaatatttaaagaaatagtatgtgtgaagaaaatcttgtaaatctatccaaaatctatccaaaagcagaggataggcctggctactaggtgttactttgataaagtgtctctgtaaatcatggtcaatatgtgagagatctttaaaaaagatgttaactaataaaatcactgggactacctctttctttcatttcaatggaattgtaaggactctgtcaggcaggattgatttcagcaaaaggtagaatggggtacaaaatatcccttgtttcactgaagtatatacagaaatagtaagactcgttggattcagtcagttttatagttaaagcagttttgtgggctgaacactgacacagtaactttcacaaagtaggcaaagttaccaggcaggtattgttctcttaattaaaaaaaaaaaaaaaagctctacaaaatatttgtcttgttctaggcatttgggtaaaatagctctctgttcctcttcacttattttggaaggggactgtataatgattttccccccacaaaaatgaagtaatgtaaattacttgagatccatgagagtattttggcgtgggatgactgccctttctttttcttggcttctagagctaggcatccgcaatttgcaaaacaaattcaagataaaatacccagctgggcaagtctgtacagtagatctcacaaactggtttgctattcaatctttcttctccctacccacttctctctttccctctttttgtctttctttccctgtctcaatgaactaactgctcaactgttcctctcggctattcatcttcggaactgtctgccgatgaagccatttatttatctctgtgactgaaaaacaagttgtctgaactgtttcagattcccaataagctggcaggcccacttgctcaaagttatttatttggggcattaatagtgaggtggttgtgggtggccaaaataattgagcagttgttgtttaacacagcaacgacaacaacaatgacaacaaaacaattgtcaggaaatcagccaggaaacagcttgtaaacagaaaaggctgaagggatgaaactctcctatcttcaggttaccagatctttcagtttctatttcaagggtcagcaaactatggcatgacggcctaatccagcctgccaccgtttttggtaaataaaattttattggaacacagccatacacattcattcatatgcctgtggctgctttcccactataataacagagttgaatagttgtgccagagacctacggcacacaaagcctataatatttactacctggccctttacagaaaaagtttcttgacccttgctgtacttggctgtattggacaaataatgtgagatactttggtctttcacattaaattttaaaaatgccttagatgaagtacccagcaatcctttgagataactggcaagttgaaaataagaaatatttatcataaaatctgtttacattagccttccacttcagtaacaattacacacagcaggaactaaaaaacaacttacagatctttcatccaactctattttacagataaagacgctgcccagaaagtttaaggaattgacttgcacaaggtcacacacctaactgagagatgaggaacacagatcccaaatctgggaaaatatattaagaagaaataaacagaacaaagtctattcgcttgaaagaattgtagcttatctgatataacttattgggggtgagaggttgggtggtggagatgaaggtcaagcttgaaaaaacagaagaaagtatttggtttagtattcttctttccccttcacaattgtgaatagtagctgctttccccttctatttaataggaaattttctttacttgctcagtaccttctcctgcaccgtgcagagaaaccccaatcatatgtttataatgtttatttcaaatgattagaatgaatttcatagtcactacagagtttatccttcagatgttacccaatttttaagtcaccaggacgctgtgtctattctcagcctctggggtggacacgtattacgggttggcacagagaccagttccatgagtgagaaagcagccttcagtgggagagtggccaggaacaaaacgtcagtgggtcagggtggagtgggaagagtttggtaactcaggggaaggaatgagaaatttttcttaaaagagaaattctgcaactttagaaggattctttgtggcagatttcaaatttctgctctataagttggcttttagctttctgcctctagagcagtggtttcaaacattgatttggatcatagttccttttgaggatttcacatagctatggattctgcatctcctcccatcccccaaacacatatacaactaataattttgtctacaatttcagggagtttacaaactctctaaacatccacagattatccatagagctcaggttgagaactcaaccccccctcactccccaccgcaaacgttggtatttatgaaagtaataaaatgatttttcccttggatacagcctctacactgtactcccagcttaaaatcatacatagctcttcactaactttgggatcacgtcctaactcccaagaatggtataaaaggccttccatgatctgggctctgcatctttctccagtattatctctcaacacatcctttcctcaccctatacaatggtgatactaaactacatgcagttctccaaacccacagagctctttctcttctccaaatttttgtaaatggtcatatcctctctgcctggaacactctttctctgccttttcctaccaggtgaacatcctttttttctgggctcaactcagatgtaattttttttcaggaagccttctctgaccacttagaactgagttaggtggccctctcctgtgcttttgtgagacccagtactggcccattaggcagcctttgtcactctatatcacaattgctcatttgcttatacctctttcccattttaagtgctttgaaggctgggacatgttcattgtgaaattcccagggtatagcagactctccatagatgttttctgaattaaaaatatatgaatgattgaagaagcaatgtgaaggaaaaaatgaggacagaacttcctgctgtgaggcacatggtgtgaaaatgttggctctttccaaaggcaactggaaaaccaaagtgggggagaaaggcaaaggttgagcaacatttttgaagccaatgttgtttttatgggtgtgccaccttagaaggacctttggcaaatagaatgtcttaggaaagaaaagttagtggtgaatgatgatggagatcatgatgacaatgacgatgatgatggggctgatgaagatgatgatggggatgatgaagatgatggggatgatgaagatgatgacagggatgatgaggatgatggggatgaggaggatggagatgatgatgatgatggggatgatgaggatgatgatggggatgatgaagaataatgatggggatggtggggagcatgatggggatgataaggaggacgatgggggatgataagaaagatgatcgggatgatgaggaggatgatgaggatgatgaggatgatgaggatgatggggatgatgaagatgatgatggggatgatgaggaggatgatggggatgatgaggaggatgatggggatgatgaaatgatgatggggatgatgaggaggatgatggggatgatgagaaagatgatggggataaggaagatgatggggatgataagaaggatgatggcgatgatgaagatggtgaggatgatgatggtgatgatgaggatgatgatggggatgatgaagatgatgatggggatgaggaggatgatggggatgatgaacatgatgatggggatgatgaggaggatgatggggatgatgaggatgatggggatgatgaagatgattatggggatgaggaggatgatggggatgaggaggatgatggggatgatgataaggatgatggggatgatgataaggatgatggggatgatgaggaagatgatgtgcatgtgttggaaggcagggagaaggcacactgatggaataagagttctactagtattaatacttctcattttttgaaagataaatgccaagccatgtgttgagggcctgcattttttatcttaatgagtccccataataattctgttttaattattattcacattttaaagataaggagattcaagttacagaacttgtcttttttccccacatgtatgcctttaaaatcaaaagtactttaaaggcgattgagcttagtaaacaagataataagcaaatatatatacattttaaaatccctctgttcaaaaagggatttcagtgagtagacagcactagtgaaaggtgggttctgggatcaggcagacctgggttcaaattccaactttggttttttctaagttgtataggggtaatatttaataaattttacctccaatgatgattaagaacaaatagcataaagtaagtgaagtatctggtatacaacagattcaaaacaaatattaatatctatacttaagtcaatttgatattaattgaatatcatataaattttctgaatatcatacatataacacaaggcattagattaaataatatacaatttctgatcatcagatagtgatggtagcatagtatttatagtaatactagtaataaatcaacaaacaataattatccagaaatgttctcacttaaacttagtaatagctgagcattaccaccactgcctctaccaactaaaacaagattaggaaattgtgtttaagagtaattttatcttttgttgagtttattatatgagttgaataaactgtcaatccccttttcttttctctttggtaggctgtatatcaagcctatactttctcttcacaaaagcaaaaggatatacattagaaactagttttataccatgaattttccattcctctagaaatatttggaaagtattatggttttgggtaggacaagttatcaacattttctattctcattaaaaatgaaggcaattcagtaaatgagtagtgatggagtctaaagaggggtaaatgataccacagttccaaagaaagaaaatcacttttaaagggttagttcttaaatcaaaatgatggccaaattatacatgaaacaaatccggaataaaaaaattgatttccaaagatggcttcttatactctataaaacatatatgatctctcctttgggaataaaaaaaacccagtatgtaattttgactctggaatttcaccttaatgacaattgtatagactacttttggctgcttgttatactcttcaagatagcaaagtgagaaatccaagaaaattctcacatgtctcatgtgatatcccatgagaatatattgtaatgatgaaaaaaaatggagcttttgtagttagaatgtctgtgtgtaaatatttgcttcataatttactagttgtttttcttgggcaaattatacaattttgtatattttgacttcttgtctattatggaaaaaataatagtgccttcctcatggaattgctgtatggcttgaataagatcatgtaaataaaatatgtgacacagtctctggcccctatgaggtgtttgctatggttttaataatggcgtctcctccaaaattcctgttgaaacttaatcctcagggtagtggcacaagaggtgagcccttatgggaggtgatcaagtcatgagggctctgcctcctgacagggattaggtgcccttataaaagggattgagaaagtgagttcagtccctttttgctcttctacctaccaccatggaagaatgccatgatgagaaggcacctaatcagtggaacaggccctcaccagacacaaatgccagtgcattgatcttggacttcacagcctccgtaacagtgagaaatacatttctgttctttataaattacccattctgtggtattttgttataacagcacaaatgaacaagacagtttccaagaaacattagcatttattttaactattatctgctctgacaatttttacttcttatcacgtatactgacatttaattgattcttctagaaatctgtttatgtgaactgtaaatcttttaaattttcagtcttcccttatgacttctctaggccttactttctccaactttaagatatggaaattagactataatttctcaattccactctagtgctagaatagttgaaattccatttttatttaatcaaaggaacaataaataccactgtgatgaaataatttgattttttttctcattgagtcaaaaatacaaactatcaacaagagatgcaaagattttgcctctataatgaacaaataatagattgatccagttgagggtggagagtaggggatcaaggtggttgtcttctgatgacattgaagtaaatacactgaagcttgggaatggaaatgttgaataaatgtattaggctgaattctggactggattttcaaggcataaggtagaactatacagctttggtaataagttctgacttttctcaactaattctaacaaaagattcatatttttccctaatactataaaaagaatacaaaatattttgccacagataatttttatgctttgaatctctccattctgtactaaaatatacaaaatgtattaatctgtaaagtaacctacaaattttgacatactttttctcatgagaaatgagagaatgtctcggttattacaggttgtctattagacatgggaatctaggtgcacaaatatagtgactgtggtcaatatcttccaatgtgtttgtgtagtctaatgtgacatgattgcttttttgaatgtactattataatggacagaaaggacattagaaaaggagccatctgttctctgttaaatgtagctatgaagtctctcttggattagcaaagcaagccactaaatacttcagtgagacttcaaaaaagctgagttctccctaagaatcactaagggatgaacttcaaaagattagaggtttcacttggatcaaatcccagaaaatcaagttatttaccaaatcttatttatgcaaactatataaacacattttgatctgcagggtaccaaaatgatgttttagaaaaatgataaccttaaatgaaaagtctactgtggagaagactgaggaaagtcaacttttttttggtctgattattttgtctgtctacattgatcaaataagcggtacaactactgccagatctgatgctactctgtgactatgaacatagaaaacagtacctaaattttttattaattctattgggaaataagattggagtatcttttttttttcttttttttttttaagatggagtttcgctcttgttgcccaggctggagtgcagtggcatgatctcggtccactgcaagctctgcctcccaggttcaagtgattctcctgcctcagcctcccgagtagctgggattacaggcacgtgccaccatacctggctaattttttgtatgtttagtagagatggggtttcaccatgttgggcaggctggtttcaaagtcctgacctcaggtgatccgcctgcctcggcctcccaaagcgctgagattacaggcgtgagccaccacgcctggccaggaatatcttatacacacacacacacacacacacacacacacacacacacacacacgagtattttaatgttttgtttctttttgtttggaattacaaagactaggtagactagtaagcctaaattatttctagatatcaatctttttttttattatttttttagacagagtctcactctgtcaccaggctggagtgcagtggcatgatctcggcccactgcaacctccccctcttgagttcaagtgattcccctgcctcagcctccagagtagctgggaatacaggagcgtaccaccatgtccagttaattttttttttttttttgtattttagtagagatgaggtttcaccatgttggccaggatggtcttgatctcccgacctcgtgatccacccacctctgtctcccaaagtgctgggattacaggcgtgagccaccatgcccagctgatatcaatcatttttaaaggcgtttttcttctataaagatttctagtatatctttgggttcacagaatgactctttacattaattcatcaaaatagaaaattcagaataaggcaggtctatcttggcacctttccaacataggtaactggtatcacttggatcctgcgagacaaaatatgactatatcttgcattatctgctaacgaatatatcaattgtttatttacatgtatgttttcttttactacatagtggttattttaagaatatgaactgttttattcaattatgcactcctattagcatatataagcctgatagaaagtagatattaagtatatatttgttgttaagtaaacaactaaataattacttgaaaatcagataaacttcatttataacatgatttataattacttagatattattaagaaagtaacattctcagtaaactatcgcaagaacaaaaaaccaaacaccgcatattctcactcataggtgggaattgaacaatgagatcacatggtcacaggaaggggaatatcacactctggggactgtggtggggtggggggaggggggaggggtagcactgggagatatacctaatgctagatgacgagttagtgggtgcagcgcaccagcatggcacatgtatacatatgtaactaacctgcacaatgtgcacatgtaccctaaaacttaaagtataaaaaaaaaaaaaaaatttttcagtgaaatgacgaatatcaatattacatatcatataacaacatgttttacctgggagtacttattaatgtcagttcaatataatatataaaccttttcatttgtgattaaaaccttgaatgtaaattcaacacacacagatttacgtgaacttttaaccttttttttcctcagcaatttgggtaggttggttgtatcggattctagttacttgtaactgaaaacagatccttgatttgaacataactgtccagtgatttttcaatttggtaaacatttgtggcttatgttcctcactgctgatcaggagagaatgcaggaagggagactgatatatcgtgcagttaccaatgtttacattgttttgtactttccagattcatgtggtgcttttttaaaatgatatacatttgggactggaacaacttttcagctgctggctggatccaaataacagttcactgagtacatatctgaacatttctaaatatttaaatcaaaactgtgactaaatttgagccaattagatcctctttagaatttgaaaatattgttatctagccatcctcagaagaaaaacaaaaacaagttttaaaaacagccctcttctccataaagttaacagaacttgggccaagcatgagaaatgccacaccactgagtatcatggaaatttaaaatcagtcaactatttgcttcatgtacatgttgccaaataattggcctaaaaattatttaactaaactaacggagtcaactagctgttttggtataaaatgaacagcttgattatctcatcccaggacatgatttccttgatagatttttggttgaagttcatcatatttatctaacccttgccaggtattcacttcagttttcttcctgaagacacagctgtattgacaccgctgaaattctagcatcatttttaaaagttgcttttttcaaggtattgggtaagcaatagtacttcatttggggaaggtgttatgttaataaatattttgagagttaactaaatgaaagtattttgagttctttggaggcaaaataatattgttagatgtaatattaatgtgcaattgactagccatataggtcatatggaaggaagaacaattcagttcctttaatcacttaatgctaacgatggccattcgcatgtatagcagtccttctgcacctcagcgctgcaacttttcctttacatcttcattaaatctaaatattttctcacgtattttctttaccttgatctgacagctgggttcatggcttttccccagataatatgccattcattcaaacaccctactattgctttctataccaggaaggtgctaatctttgaatttaactgggtcctggtcataagataaagtggaatggtttcttttttatatatagggaaagcactaaagatctgaataatttagtttatttcagtaatttaactatatttgttatttacaaagaaatcaaggagagactattggtatgtggtgaataacttccagtcaaatctaacattagtagaaccaactgtgtacttactactctactgcactgctcttcagaaggtagaagaaaacaacgtaagcattgacatatatcttcacttcttagggaagccaggaaaagcacagttatttacctgtaaacatttgttacagtgaaggagggctgtactgtttctatttaaatgcaaataataattcacaatgttgtgtagagagtgatttattttgatacgttttccccctagccctaggattttaggtcagctactagaaatattgcccaaggacatctgttcaagaaccaattttacaaaaaggtcatgtattccttaatataagtatctatggtcaaggataaaaaaccaatcaggcctaacaggatttataaggcgtgggttatgaaaagatgttccttagagggttgcagttctatgaactgaatcaggaacaatttggagcttcgggaatgatctacttactgcaaactgtaatatgtcttaaaagaccaaccaattatagttatcattatcattataaaccttctgctttctatcttaattatattactccatcataacttcaacagatagatactgtgttcagagaaaatttacattctatatcctaattatatatggatacatatttaaacatagaagcaagactttgaaaattaaagtgtttacaagttatacactgtgactatttctaagaaaactggattactatttagagatttatataaaaaactgattttcctgtgtgggaagatttagagcaaatctactagaagatacaggggcagattggccattccccagtcccttcctacttttatatgtaggggacacttaacaagagacaggtccttgggttagacagaatcacttctgggatcaagtggaacattcatagttacctgtagaccaggtaggggcataggatgctgacagaggctacattttagatttcttgaggtacaaacagtccctactcaacttccctgattacaatgtagatgagttaagaatagtggcgaatgaaaaaagagagaacaatagagacacatagtattttgaaccaaaaagttatatacagatgtaaaacacaagaaaagttgcttcatgcagacacatcaaaaaactatagcagattgcatttgttagaaagagagagaaagagagacagagaaatatttttgcctggggatagtaagcataatctgagaatatcactaacagttttagttgttctatattagtactttcatataagtatatattttaaaagtaatttcatgatgatgcaattatgtttagaagaaattcagagttttataaggtcactttaatccagaaaaatattctttaaagtttaaaaatactgtttttttcctcctttaaaatgttccattgatattttattgcagtaaaatattcaaaaatggttatgcttactatttctcatcagtcagaatggctcttattaaaaagtcaaaatataatacatgttgatgaggttgcagagaaaagggaatgcttatgcactgctggtgggaattgtagttcagccactgtggaaagcagtttggagatttctcaaggaactaaaaatagaactaccatttgacccagcaattctattactgagtatctaccttaaaggaaaataagtcattctaccaaaaagccacctgcacttatatgttcattgcaacactgtttacaaaagcaaagacatggaaccaaccaaggtatctaccaatgttgaattagtaagaaaatatggtacatatacaccatgaaatactacatagccataaaaaagaattaaatcacgtccttttgtagcaacatggatgcagctggaggccattcttgtaagtgaatgaacacagaaagaaaaaccaaataccatatgttctcacttataagtgagagctaaacattgagtacacatggacataaagctgggaacaacagacactggggactccaaaagggggagggtgggagagaggctggggcagacaaagtacccattgggtactatgttcactatttgggtgacgggatcaatagaagcccaaacctcatcatcatgcaatataaccatggagcaaatctgcacatgtaccccttgaatctaaaaacaagcaaacaaaaaaatggttatataaaagtctgcaagctgtaatcaatgacagaataaatggaattttttttcttagcctttaggaaaatgccaagacatattcccacctctcacatgagttggtggtttaagaatttggtttgcaaaacacaatttaatattttatttatagaagtcaagagaaatggtaacaatttaaaattttgattcttgaatatctgtgcttgttaaaaagaaaaggtgtgtgggtgtgttgaagggtttttattccattactaccataaaatctacttttatttacgtcttttagaatcaaacttttaaaacatttgctaaaatttcataaatctcatatgccaaaattcagctgagccaaactcttagttacctgttctccgtttttgagctgcagtagcatttggtaaacagaatgcccagaacctcctctgaaagcaccactagcaggcactgtgagagcattttcattcaagttcattcgacttgggcaaaaagagaacagcggcttacatcaactgaggatcagtgaacacaatctcatagcaacagacaccaaaacagtccctcattacaagccttgtccaacaatcaagtctttaacgagaacaaaggttgacagtgattaatcattaagcggttccctgttccttgctgcacgtgttcacagcagcctcctacagaggcagtctggcatatttcctgtctctgtgctccactgtgccatgtctgaagggacgcccaggcagccttctcactattttaatttcaaatgctacaaacatctacagagtctctatgtgcacatgtcttgacttttattctgagcctggcagactctgaatggatatagggagtatgaacataataagccgttaactccacatctgcttactagattatgttcaaagacagtataagaaattgattaaacactgttttctagaataaacctttgaaatctgtttgtttccttaagcaacacaatgataagttgctataatttagttgtgcagtgaacagaagataccttcactactgtttctacataaaaatagcttctgtgttgtcaaagcaccatgctttgacaagcaacaaaaacattttcagaaacctctttcaaataattctgtttcacaaggcaacagaattataaagtcaactaatgctgccaccattttattcaatgttcccttttcctgtgtcttttttatgacctgtctgggcattatctatcttagttggtcatgcaatagcatatgtattcaccttaacagactaacttggagggtttttattttctctctttcaacatgtacatttcactgatgaccatgttgcctgtaaactgctaggagctcaggtgaaaagagagagttatgagatacagatttctgagaggtgaggggcaagggttaattgaaatttttaaaatgatcaagggaagtaggttatgtatcaacaaacatattgtttttccaataacaaatgtcacatttaagaacaacaaaatgagataaccctaagcattctttgtatctattcacttctctcttcaaagtaatcagaattaagtaatgtgaggtctccagtagctcatgtagtagattataactagtccatctacaatataaaagctaaagtataaaatccaaccacaaagtgatacaggactgctaggaagggaagagtgtggtccctttaaatgacatggaatgggggaagcaaagtactgggtagagaaaggcaggtccctggcaagggctccactccaacgacctaggtgaggacaggcacttcctgcccaaatgttgcatttcccaagaccacctgggcctgccacaaccccatcctgggcctataaaaaccccagaccctagcagtagacacaaaggcagccagacgtcgagaggagcacactggcagaggagcacacgcacaagcactggcgcctgcaggccgtcagcaggacactggcgggacgaggtggggctgttggaggagagccagggccaccgagcagcccacctccagggaaagagcatcttccttctggttcctccatctgctgagagctacttccactaaataaaactttgcattctttcttcaagcccacgtgtgatctgattcttcctgtacaccaaggcaggaacccaggatacagaaagccctctgtccttgtgataaggaaggggatctaattgagctggttaacacaagccacctatagacagcaaactaagagagcacgctgtaacacatgcccactggggcttcaggagccgtaaacattcacccctagacatggccgtggggtcgcagccccacagcctgcctgtatgtatgctcccttagaggtttgatcagcggggcactgatgaagcgagccacttccccatctcacaccctgcgagggggacaagggaatctttcttgtctcaaaagtataaaatatgcaattctcccagtatactcagcattttagtatacagctgcagtttctttaaactgagtatattcactgaggaatgggaaatgacaatgccactctacgaacaaaaagactaccttattattggtaactaggctctccacagggatccttgcgacagggatgacacagtggttgttgactcacattaatatcaaagcagcctgagaggaaaccacattcagaaaatgaacttaaccacagcctcctggaatcaacatttaaaactaacatcggtgaactctgaactgagaaggaaaacagtgatgaattgtagagagaaagctttcaggttttcaggtggtctcaaactacattcttacaaaccaaccaattgattattttgactcaattcaacttgtagtaaaaaactctaactggttctgtgttatctctgcagttagggtacgtcaacttcacctcacacaaacatacttttaaaacaatatttgacttgaactggtctgcttatcctctttctctaatttgaagctccacttgtaacatttgggggcttatgtcaaagtcttagaacaaagacttaaatcaattacaagttaaaggacttaaaactatgtgtagatggcatggaacattgaagcaatttccaaatcatggggtatgcaaatctcaaagaaattccaatgcatgtttgagtcattaattcatcaataactataatagctatcatgtgttggacactttctccatatcagtcactacactgggcactttatacacgatcacatttcataactataataaccatctatgtactagccaccctattagtatctccattttatagatgagagaactgacatttggagaagctaaatacttcatctagttagtcagtgattgagccaaaagtctatctcaggcagcctgactccagagccctgccataatatccgaaaagaaataatacaaaactaaggcagccagagcccttgatctaaagtggtggtaaatctatactattggcacttcatatggaaacatgaagcaatttaagctactacataacagtacagttcagttatataggatctgcatttgatataggagtaatatgacgttgaataagtagcttcatttttccaaaccccagtttcctcatctataaaagtagtaaggtgcccaattcccagggtagcagtgagttttaattgagataatatgtgtaaaaagtattttgtaaacactgtactccagctggttgaccattatggtttactgtgaaatataaaagaatgaagcttctgacatgttttctattgggccaattcaatagatgtggaagagctaaccataaaatgaaagtgctaagaaggcaaaaaaaaaaaaaaagggggggggggcaattcatgaagacatattagtgatgacccatgtgtaccaaaatgtgtagaagatcctttatgccatggggaagaccaaagtgacctgaaaaataagtgaattgtctgcaggctttatggcattagatactaagaatatgaactttgtacttagacagacctgggtttaaattctgaacaagttagtccagtcttaaggtatctaatgttctcattaatgatattgaatcatgaatgtagggattaaaggagagaatgcatatgaggtgcttcatactgacaaggctcagttaatgtggtgactattattattattatttaacttctcaggtcagtacagtataaaggaaagaatgaaatttcaggagaggtatgtattagagataatacatgcatggctggccctagggaatgtacataaaagacgtatttggggcatcatcaggtcgcttctaaagtccttttgttcaaaacttaatctttatttaaactttatttaaacttatttatttaaataaatgatccacttatatcaagaaatccgattgggtctctgtatctcatgtagatagactgtttggttcagtgaactgtcctccaatttacaccatgaatctggaactgctttctgactgatcatgagaacagacactgcctacgtgtacatggggggagggtgggtgggcagtgcacattaggagggagcagagagcaaaaaagtgaaggggaggggagagaaagactagaagatgaaagctggagatcaaagagtcattctgcccatcctgctcctagcagccacaggaagctctctggtggtgatcagattaccagattaccacttgcatcagattcaacacccttgccagacccctgtccctccaccatgcctctcacaccttacttctgttgatgttttagagtccccacctctcctaagtttgaagggagcacataccatactgtctagcagagatattcagattctaggaggaacactttttgtggggataaaagctaactatgatgacattttacaaaagcttttgggaagaagaagaagggctcctatgttcatataaacacaaatatgcagattgcccttctcatcgtagtttgtgtggaattatggactttagggacattaaaaaagggtccatataataactattgttagtatcctaaagactaaactttcaatttagagtgctttcggattgtgttctaatctgagacttttttgaatttaggaggaacagatccagaaactctatagaaaagatttgtttaaatggctcaaaaaagggagataaagaatcagccaaatgttgctagtaaccctttcttttgatatatggaaactatataaaatgtaaaatttctgagaataatactgaagtgtagtaattttaaaggcaattaactatgtgaggaataatcagtaataataataatactcaacatgtattgagggcatgatatgtggaaggcatattactaaacaatttgattaccttgtttaatctttacaacattcttttgaggtaggtagatcttactattcctcccatttcatagatgaggaaaatgaggcttagacaagttagctaaattgcacaacatttgttagttagtaaatggcgaatctaaatccagtttggaaaagcagatgtgctttggttatgcataccttgatttctgaaaaagtgcaggtaactgaagtcttaaaaaccaaagcacactgagagattacccctccctccctctctccctccctccccacctcttttctcccttccctccctccctccctcccttccttccttccataaaacaaatacatttgcattcctactgtgcctacaataataactggggttatagtggtaaataaatcagagctctggccctcatgaaaccaacattttagtgtaggaagacagataatagacattttaacaaataatatatgatgataaatactataaagaaaaagaaaacagggctggaggcggggtgtgttgctggtacaggtaggagtgggtagggtgagcagagaagacttctaggataagatgacattggacctggaagaagtgaggggagagccttgtgcacagtggagggatttcaagtcctgagttcttgaggtgggagcatgtttcatccgcctgaagcctagcaagcaggccactgtgctgctgtgcaagaggcaagattggcggtggggtgcaggggtggagaagcaggggagacatggtcctgtggggcttcgtaggcaactgtcagaactttagcttttacttgaataataaggaaagccattagaggatactgagcagaggaatgacatgatatatgttttaaagatcactctgtcagctatgtggtgaatagtttgtacggagaaagaagatgagtaaggaaggctacaggaataattcagaggtgagatggcaggggcttgggccagagtggtagcagtgggaagtggctggattccacatagtctctgacggtagagccactaataagcaactatgagattttggcctgagtatagggaagtatagagttatcattttctgagatgggaaagactgtgaaacagttttgctttctgtggggagggagttggaggagttggaaatagggaatttaacctgggatatgtcaagtttgagatgcttattacacatccaagtggagatgtcaggaaggcaacttgatatatgagtctggagttcaggagagaaatatagactagaaatagaaatttaggagttgtcagcatagaaaagatactgaaagtcatgaatttggatgctatcacctagggagtgagtatagatgatgaaaaggagtacagtaactgtcctctggacaccccatcgtttggaagtctggtatatgaagaagaaactagcaaaggagagtgcaaaccatgaatgagttgtgtcctgaaagctaagagaagaaagtatgtcaaggaaaggaagtgatttaatggattcgatgttcctgataagtcaagctccgtcgcccaggctggagtgcagtggcaccatcttggctcactgcaacctctgcctcccaggttcaagcaactctcttgcctcagcctcccaagtggctgagactacagggacctgccaccatgactggctaatttttagtagagatggggtttcaccatgttggccagcctggtcttgaactcctgacctcaagtgatatgcctgcctccacctcccaaagtgctgggattactggtgtgagccacggcgcctggctgagagttaagaattgaccactggaattggcaatgtagatatcactaatagttttgacaagagcagtttcactggaaatctagagacaaaaacgtgattgaaatgagtttgagacaaaatgagaagagaagtagggagttaggattggggataatttttttcaaggagtatggctgtaaagcagaaaaatagagaggtagcagaagaaaatgtggaggttttttgtttattttgtttgtttcttaaggtgagttttaggttttatgcctatgagaatagtttaaataaaaaatggcaaatgccttaatgtaaattcttccccttattttttctgctttataatatatacaatttagtatataagttctgattatatatagttagttatatagcaagtaatattgctaataagtgtggctagtgaagttataatagtgccagtgatagtctttggctatcatcctgatcataacaatcattttgaatataatctctgtagggtttggtctttaataccttgcaacaggaagctattagcttcaacatggggtcctctgggtaggaatgcatgctgaatgtgctccaaaaatcacagacaagtttttgaataaaatacagttagagccataatatggaaaattgttatggaaaaaattagtcactcactcacttgagatataactcctggcatatcagattttattttagctaaggtaacctaactttctgagtcctgtaaaaataatttaaattccccattttagccatttcagcagccaagggctgataataataattataataataataataataataataataataataataatacacatgtagaaccagacacctggcagtgaatagtggattgaaaagctactggaaacagtctagctggggaaatggtaaaacttagaagaccttaatattggaagaatatgattatacatcaaagtccattttaagtaaaacttttgttcaaaaatccagttgctagtttatacgtttttctccatacttatgactcaaagttcaaactttggttgtccctctgagtctcctagctctggagtttacgctattcagtcgttaagtgctgtttaaagaggctgcgaagcactttctagttaatagattcacattctctacatggtcaatgttggaggtgccagtcagtgaaggggagtgcatgcagagggaacaaccttgcacacacagatttagtagggggaaaaggaagagtaattgggagggtttttctggacccttacttcacttctaaactccaataaagaccatcaaatattgccaagagtatccccaggcaaaagtgccttcaaaactcccttttgctgctttttcccctctccatcagattctcatttttgaaaagcaactctcttctgcccaggactctatagtctgcttcttctgccagcttctgaagtctaacccacacttgccttcctattagcaccacatgactcagatttataaaggtctcctttttggtatcaaaatgtatctaacttatggccaatttctcttgttctcagctaggtcaggactttgcaaactttaatgtgcatatgaatcactttgggatcttgttaaaaggcaaagccttattcggtaggtgttaagggagggggtgactggggcactgagtttctgaatctctaacgagctccatgtgattctgatgcagtggatccgcaggccacgtgtgaactgatgagagctaggtgactgaagcttcatggatacactactgtgagctaaggtggtagggagttattgtatgtctgctttcagacaatgtttacagttttacagtatattttacacattaatcatataaatgaataaaacaggaattttaagtcttagtggcagagtgtaaggaagaaaattttggtcagaatgagagagacagaatggccattactccctttcaaactgaattacctttaagtcacgagaactccagacctagcctttggtggataaaaccagaaactctcctctttgaagtttagtctcaaaagagtagggacaactatgctatatggatagaaggaaataggggataaatagtgctaggaattatggatttcttccctttttttcttttttcttttgtggtgtgtttatgtatatctatatttatgagtagagttatatgtaaatgtggaagccttcctcaagttgatcttttcacccttgagcctaaatcagtcacctctcctatgtgcttccatagattcctgggtttctccctgttgaagctcttgtcacactgtataggtttgttctcttctccattagactgggagctctttgaaggaaggactgtatctggtcaccattgtatctacaaccaccagcatggccttactcacagcagtgcttaataaatatttgttaaatgaatggaaaatcgatatatttcaggtttctgtaactggtgctttagtttcccaactagagggggaggatacgaatccatcatgaccccagcagatgaaagcctccttgtgggctactcactgaatgcctgcggctctctgtctactgggcctaaggtaggactgcacatcctggcctccttgtaggtggctgggacttctggttagctcaagccagtgagttgtgagctgaagtaatgtgtgtctctctctggctaagaatttatttgttaatgctagccacttgaggactcgcttttctctctggtacagcggctggcaatgtcctggttggtggctgctccaacacctatagtccaagagtgactatgatgggcagaacccctttcccccatcgtgcacgtacagtgtaagaaagaaaattctgtgttttagccattgagattttgacattatttgttactgctacataacttcacccatcctgattaacagaggttgtgagggtaatgccaagaactgagggatgccatgtcctgcctcttcccagtcccagcattcctctttgccttgaagctgggctccaggtgcaacccagatccaagactgtggttctgaaagtaaggctttgcctctgttcttgaaacagagttcctaccttgaacctggttcaggttgaaggattcctgccatgtgtccatgactaagctggggtctctgtaggccaggccatctaggatgggaggagctgccttgcctagggctggcaccctagggctggctggatctctatcactgctcctgctcctccaaccatgtgatccattcacaggtcagggcaccctgaagaaactacgttgaatttcattttgctcataacagtattcccaagggttatctggtgctgtattctgtctgccacaatgatctccatcgctagctcccgtcctgaatctttcctgagaccccagtgcctgtcctataatcaggaaattttgtcccagtttcctgcctttctcattatgccctgaatcatgcagttaaatgggccatgtgtatctgcatccagagacataacagatgggatcttggggattaaggtagcaaacagagagcagagggcttttagaaggattagtctttcgcttggtgggaagggtagagaaggacactggggagctgatttgaaaagggtcactggggcccataagcatatgtgacagtggttggatttagttagccctcactgtccctgtctatctgtcccccgaatatctgtagaggaaatagcactaggctaagaggcaaaaaacatgggtttgagtgctggctctgccacttactttctgtgtgaccttgacagatcagttaacctctctgagcctatggaaaatgaagctaattatatgtgtctaatgtggcccataatgaggctgactgggatctcactcacaaggatcagatgaaaggatgtttgaggaagcacttggcccattataaagtgttttttacaggtaaggcagtattatgacaatgaggatgtttggaacagatgggcagatggactaggccagtagacatgacgcttaacctcaaaaccagtgatgatggtatctttgtgtttaaatagaaccaggcaattgtcacattataaaaaaatgactgctaaagatactgtatctgaagaaggtaaggcatgcaggggatccccaagactggggctgggtagagctgagcaagattcagtgaggaaaagagttcaggaatgagaagttagaagaggatgaagcccctctgcagtgggcaggctggaatggacgatccctggcaggccactcagcccactatgctactgacagaaaacttggaccctcatcaatcagggaggttcaaccacactgcgtcccttcctgatttgcagtcgcgatgggcagaggtacaaggggagaagctgcagacggcattgttgccatatgatggagtcactgtttgcatattttgttgctgggtagtcttgaggcctctggaggacctcctttttcttatattaattcccaatgcacccacttgccgagcccagccttaccgcctcgcttttcagcacagttcccacacatgtcaaagctttacagactgcccggtagccaggcaggagcagctggcaaggctccccagaatggagcctggaccacccagctagtgagacgactgatgtggaatgtgggttcatgttgtggagtgcagcaggcccacagtgctacatgggatgtcccatctgtgggcgtgggatctaggaggctatgggggaaatgcaggcagactccatgagttctcctaagaggccctggaaacatgagggtggccattgatcacaaggcctttccacctaatggcttttcctatacaagtagttcacatctcgaacatttccaggcttagagcaaacagaatatggctgagaaattctgagcaaggcagaaggtaagaaaatgcaaggagaaagttagggaagctggagaaatgtgaggttattaggatgagctgcttctatcaagaggtagtgaacaagagggcagttttgctgaataaggacagaatcatcttaaaaatggataagtctcctgcagtaaagtgacagattaattaaactgcaaaccttctcagttgtctaggtctggagaaagttaagatataagatgatcataaaaatggaaagtccagatatcaaagacacaaaatagctgaggcaaagactagggaaatgctggtaaaggagatttcagcagtagagaagcaaaccagtgaggggaagatctattttttaatagatgattaaaaattttctctcagggaaagatactgtaggttgaaatgaaagagttgcgatagtagaaaagattatttttgcaaaatgcctgagtttggagaaagaacatgggcttacagccccaacttcataacttcctaattgtgcaatcttgtaaaagtagtttgacctctctatgcctcaatttccctctatacaaactagagaacttagtaatgtcaaatcacggggatacaataaggcttaaaacagatcttgcatatgaagactgttggaaatctgtaaagttctaaacaaatgttagcttttattatcacagaatttctttgttttcctccactatatttcacactttctaagcgtgcagacatgcactcatgttgctaaaagccacatctgttttttgagtaggctggtcataggtagaactaaaaggaataattggaagacttcctctggctatctcttctggtttcctactgagtagagtaaatttcaaaccattatctgtggcagttatgtctccccagccctgtgcctaaggatcatttttggctgtcacccattcaccttacagaacttctcggaacggttctggtactttcacgccctggcaactgtggatattttgtgcaggaggcctagactgccctgccactccttctccttctgctcacctcttactcagccctccacatgcagctctgatgccaccttgcctgtgtcaaactggccacatcctctcagtgtttccacagtgctctgttcaaaactctgttatatgcttatggactgctggtgggaatgtaaataagttcagccactacggaaagcagtttggagatttctcaaagaacttaaaacaaactaccgttcaacccagaaatcccattactgtgtatatacccaaaagaaaagcaaccgttccaccaaaaagacacgtgcactcgcatgtttatcacagcactattcacaatagtaaagacatgaaatcaacctaggtgtctgtcaactgtggattggataaagaaaatgtggcacatacacaccatggaataccccacagccataaaaaagaaaaaaatcatatccattgcagcaacatgtatgcagctggaggtcatcatcctaagtgaattaatgcaggaacagaaaaccaagtagtgtatgttctcacttatgagtaggagctaagcattgggtacacatggacataaagatgggaacgacaggtactggggactactgggggaggggggaggtggacaagcactgaaacactacctattggataccatgctcactactcgagtgacgagataattcataccccaaacctcagcatcatatactctggtaacaaacctgaatgtgtacccactgaatctaaaataaaagtgtaaattattgttattattatttgagatggagtctcgctctgtcgcccaggctggagtgcaatggcacaatctcggctcactgcaacctccacctcccgggttcaagcgattctcctgcctcagcttcccacgtagctgggattataggcatttgccaccatacccaactaattttttttttctttgtatttttagtagagttgaggtttcaccatgttggccaggatcgtctcaatcttttgacctcatgatccgcccacctcagcctcccaaagtgctgggattacaggtataagccaccgcgcccagccaaaagtataaattattttttaaaaagattctgttatagcctctgattataaccattatagaagcaaacaacaaataaaccccagctaacatttattgagggcttataatgttccagacaccttaagaagcattgtacatagacgatctcactgattcttcaacaagagtttttctaaggtaatgctgttcttatgcctattttatagatgaggaaactgagcctctaagaggttgagtaactagccccagttagactgcaaacaagtaattaactgtttttaaccaccatctggactgcactgttacaaactgttcatttatcagtctcctcctctcccattagactaagagtgttcaaagaagaggaatcacactttggccagcagtatacctgcagccctgcggctaaagtttgctgaatgaaaatataagtgggctctcattttgaatataaggtgagttcatgaaacaaccctaaaatatcaatatcctctgtacattgagatcatagggaccacccaagagagataatagttgggtttgaattggatctttggccatcattttaagtctctcatcctcttagcaacactggtaagagcatcggcttctaccgtggtgagatgatgcatatgtgatagataaacccaaccctcccttccttcagaggtgattcacattgtcagtagcatacaagcaagggagagggctgtaaatctccccctattctttatgtaaccctctctacagggtttccttttcaaggtgatcaaaagtattccttttggcatctgtttgctcagcacatatgactaaaattcaacaggatataaaagaatccatttatatttatatgtagtagatggaaaggagggatgatgtagatgcaacacgagtagatacggcacagtagatacaacatgagaaggactaagatggtcccagcattgctatggggttaaaaaaaaaaaaaaaaggtatcttatacaatgcatttgtttagcatcctggcaaataaataaataaataaataaataaataaatactctaatcaaatcttcactatattgctaacacctataacagtccctggcacatagtaagtacttaataagtgcttcatgaatcgatgaataaataaaccaatgaatggacaacattgtaggaagcttgttttcctacctacaggaagtacaggatactggtgcctctggagtttctagctaaggtgacaatgcccaggattgagctgatgggactttgattactgaattggctacagtctcaagatagctctcaacaagcaatcctttgaacaaaccttacattttgtcactcatgcattcatttattcattcattcattcattcattcacccattcagcaaatttttatagagtgctattaaagctaggcactatgacaagtacttcacatacaatgctgagaagtatatgctattataatcccagttttacagatgaggaagccaagactcagagtagttaagtaagttctcaagaccacacagtatgtggccaggctgtgatttcaacttaggactctttgactccaaacctccctcgtattctctcctttatactgtttctgaccttaaggaactcagagttgagcatgggaatgatctggaaaataaacacaatgtgaaaagtgctctgacagaggtaaggactaggtgcagtgggaccacagaggaaagacatctaactcagatctggggagaatggagccaggaaggaacattagaggagatgctatcctcagtcacggaggagggctgggagcgagaggcagagacacaaagctgaggggagcgtagtacattctttttcaggttattttattttattgttttattttactttttgagacagtgtctcattctgccactcaggctggagtgcagtggcatgatcatggcttactgtagcctcaacctcctgggctcaggtgatcctcctgcctcagcctcccaagtagctgggactacaggtatgtgttactgtgcccggctcattttcgtattttttgtagagatggggttttgccatgttgcccaggctggtctcaaactcctgagctcaagtgatctgcctgccttggcctcccaaagtgctggaaccatgggcatgaaccacagcacctggcccatttttctttgtgtgaagggactcataagtaaacaaggtcccaataatgtctagttgtctgcatctttttctatttattatttgactaaatttaagggatgctatcccacagattgagtataaatggtaagtattaggtacttcagtctggaccttgaaagttttaaaaataagatttttcctcatatatttgctccctcaaaacacatatgctgccatgtgccacagcaccattgcatgtgctgttctctctgccccaaagactcttctttctctcttataagcattttaccacgttttcctcatttctgcacctggctaattcccattcattcttcaaggtttaaactccacttcccctgggaggcctcctcgaccccaagattaatttaagtgtcccctaatattgtcctctaaatccctctgtcatgacactcatcaggcttttttccccatttacttaattatctgtcactccctttaaacattacactccatgaaagcctatgactgtcttttcactcctatatccttagtgatcagcaaagtgcctggcacataataggcactgattaataaatatctgtagaaagaataagtatttgataactttttttcttctagaaaataaaaattcaatactcagcaaagtctaacatctaggcagtagagtcagactggagaaaggagaaaaaaagaaaattatgtgttctgaaaaagggcagagggaaatgtgacacagtataacattgctgtcctttattgtatccctttactgtattattgtatttacttcctgaaacacataataattttccaggtcttatcaatagtaacatcctatattcttacatccccaacacacagaccattttttttaaaataaggctataaaaatgtcattcaccacattcaggacagtgttgcttttgccagatttatggcaactgaataacacagagaggaaatcctgaaagtcagaggtgtactctccaggccccactcactatcttctaaacattttgaactgaattttacatttttaagtggatcaattcctcatttcaacccaaaggtgcctgtctgtttctgaaatttgcaacatctgctagggaagtgaagagtgaaacggttttttttttttttttaacatcaaataataataaaaaaaaaactttgttgaaggactgtggattttcaatttgttccacatgagactatttcaggaaattaccttttaactggtgctcatcttgtttgtgcaataatgttcccctgatagggatggactgtgatctaagagatttttacatcgtaaaaatgtaaaatctcttcgatttttacattgggagactagtttgtcttccaaggacaatatccaggtttctagttgtttgccgtctcaaagagattctttaccaatgtgggagaccaaaatttctccagtttctaaagctggagtcataattaaggcaaaaattatgccttcctgtgaacaaaatttttagaggataatctagataatgtagtttttcattgttggaacagggtaacggatggtactaggaggaaattctcaaaaataggctgtgttaacatctctcacctgtatctgtcctcccatcttcttctctgctcctattctctccatggactggaaactcccaccatttgtcattcactggcttaaagctctgactttctatgttcagtggcgctttaaaaatttagtggtgaggtttcaggaaatgaaagatttcaggtgctcaaagataggcctaaaggtcacattcagaaaccccatctcatgtcaaacagagttttttgtttttgtttttgtatgttaccagaccacaaaatatttctggaaaaagtgttcagctaatttttttaaaagactcactttaaaattcatatggagccaggcgcggtggctcacgcctataatcccagcactttgggaggccaaggtgggtggatcacgaggtcagacgttcgagaccaacctggccaacacagtgaaaccccgtctctgctaaaaatacaaaaaattagccgggcgtggtagcggacacctgtaatccctcagcctactcgggaggctgaggcaggagaataacttgaacctgggaggcggagcttgcagtgagccgagattgcgccactgcactccagcctgggcaacagagtgagactccataaaaaaaaaaaaatcatatggaaagataaagttcagaaatagctaatatcattgtttttttaaaaaaggaagagaagatgggggaattactctaccaggtatgtgatgacctataacagccattgtgattgaaacaatgtgaattggctttggaagaaatgaatagataaacagaatagaatggactagggagtccagaaacagactcacaaatataaggaaaattgttatataagaataataacattacaaatccatgaggaaagaatggaatatttaacatatgcttctgtgacaactgttcatccaaatggaaaaaacaattacatctttacaccatggcatccccaaatatagaattacagttgaatttccatcaacatccctaggaaaacagctcaaaactcaagctgtatacatggtagagatcattcaggttttactgagtgttctatagtgacccagttccagaggaaggcagtgaccattgacctgacagagaactgccagaactctacttaaaggcagccaagcaggcagaaatacttccagtggtaatttcactactcctggagtactaatacaaaactgggaacccaaggctacatcaagatcccaagggaaaatggtgctaaatatgctatagatctcagtttgagtgacactcactaccaatccttgttcttattaagggtggacaaataaggattcatgcattctctctttccttcctctgaacacctagagcattcctagtcttgggagatttaagtacacagagattaagagtttggttaggagtcacccaaacctgggcttgaattctagatctgactgtaaatgacttgggaacaatagtagcacgtacgtttcctagggttactgtaagaattaactaaggtaatatatctcaaaagcacagtaaagtacctggcatgaataagtgctcaacaaatttgtgcaattattattggccttttctcctgcattacacgttttaatgtttcttttctcactggataccaggttttgtaaaaggtacttttacacatttatttcattgaatcctatgagctaagtgttattatttccatttaacagtttgtgtgtgtgtgtgtgtgtgtgtttgtgtgttttctctctttgacaaaactgtaaattagtgttttccaaactatgctaaagagaaaaacaaattagtttatttactgcagtacctctcagagtcattggtatgctaaggagtattgctaatttccagaaaagagtattccttaacatagttcatgacccaaacagttgttattctcagaatacagcatgggaaaatgtgcaataaagattcactgaatgaatggatccagtttcatgcttttttttgcatgcccccagtgcgtagcatgcttggggtacagacaaaatgtttcataaattccagttgcttgatttatacgttaaattacctatatctggccgggcacagtggctcatgcctgtaatcccagcactttgggaggctgagatgggtggatcacgaagtcaggagatcgagaccaccctggctaacatggtgaaaccccgtctctactaaaaatacaaaaaaattagctgggcatggtggtggacacctgtagtcccagcctcttgggaggctgaggcaggagaatggcgtgaacccgggaggcagagcttgcagtgagctgagattgcgccactgcactccagcctgggtgacagagcgagactctgtctaaaaattaaaaaaaataaaaataaataaaaaattacccgtatctttgtacatcagtgggccaagatggggagatgctatctctttacctgaaagtgagcccacagttttaaatgtccacaaattaagaatgtttgggatcaaatcctggcaagaatatggatcaactggaatactcgaacactccagacaggatagcaaagtggtgcagccactttggagaacaggttggcagattcttataaagttaaatatacacttaccatatgaccgaagaatcccactcctaggtatttatttaagataaataaaaagttatgtttccactgggtgcggtggctcatacttgtaatctcagcactttgggaggccgaggcaggtggatcacttgaggtcagaagtaaaagaccagcctgaccaacatggtgaaacccatctctacaaaaatacaaaaattagccgggcgtgatggcaggtgccggcaatcccagctacttgggaggctgagacaggaggattgcttgaaccctggaggcagaggttgcagtgagccaagactatgccactgcactctagcctgggtgacagagcaagagtctgtctcaaaaaaaaaaaaaaaaaaaagttatgtttccacaaaaatcaaattggaaacaatcaaatgtctcttatttggtgaatagataaacaaactatcatagattcatacaatgtgatgctacttcgcactaaaaagaattgaattactgatatatttaaatcacaaggttgactctcaagtgcgctatgctaagtgaaagaagccagtggcaaaagggtatatactgtctgatcccatttaaacaaaattctgtacaacactacagggatacaccagcagttgccaggactgaaggtgggggaagaggttgaatacaaagagacacagaaatttataaaggtgatgaaaattctattaatagattgtggttatggttacatacctatgcgtttgtcaaaacttggggcacttacatacccaaaaagtgaaatttgtagcatgtaaattatagcttaatttttaaaacagggagactctcccttgaaatggtctacagcttattttacttcttaagacaacaaaactaatacatgctatttaagcactttttacaaaatggcatggaatgtgctagtgtaacctcctaagatgactgctgttcacagttccctcaaattccttttcctggcattgctcaaccttatcttgtatccaagtggtttccaaacccttacctgccctggggacaattatttctacttccacttttgcaacatttatcatgtagtaccttatatcagagttccttctctgtcttatcttcttaggattgtaagttccatacaataaaaatccatgctttacttgtatctaccacagtgcctgttaaaatgcctggcaggaatgccataaagaatgtttaacacataaatgaatctatgcttaggtaatagtttcaagtctgtaagtccttcagagactgtgagctccttgaagacagggattgtgcatacctaatcttgtactagacttgacgcactgtaaatgctcaaaaatttttgaataaatggattccagcagattctgattaattttgttttggatggtgcatggcagaggaattgactcttggggtgaaagttgtggtctggtgagagagcacatggaagaggagagtgtaccctgggtcgcgtctgggaaaacctagtgacagagggtaaatgtgaaaccttccaggttgcattggctgggtttcatctctcatcacgagatttttttcagagagctcttggaagggagatattccatttggatccagttggaattactaacagaggatgggctgcaacacggcaggtttccaattgtgtttcttaggcttgaaactcttcccagaagcaaagatgatgaaggcttcatttgttaggcatgaaaatagaaaacactttacaaagggttttaaggaaaatcttttctttcctattatttttatcccccactccctattgttggccaatcctcaaattttaaactctttggggaaagaacaacgttccttatagctcttgttactaaactaaactaagtggaagcattgaatctactttattggatacatttaatgaggttttagttgtaataattatggttaaatagttcaacatctaaaacattgtagtactttaggtggcctgaggggaatgcgtctcataaagatatataataacataatgatcactcataaagtctgggttttatactgtttgtatctaatgactaacaaccaatccaggaagcacagaatatgacccccatctccctgtcctttcattgcttctaaaacagcacagtcagccagctagggcagttggtcaaatactttgaagtgtgtgtgtgtgtgtgtgtgtgtgagagagagagagagagagagagagtgtgtgtgtgtgtgtgtgtcagagagagatttcttctgtttaaaaacatttgttatttatgaaaccacataattaaaaataattccatcaacttactataaagctccatttctaatgcaaaaaaattttgtggaagtagcaaagtaataagaaaagacttgaagcttttcaaattctgcccagaataccaaaattatttttgatactttaatcttttttgatactttattgagcattcaaaatcatttagcatcacgagaaatcttaaaagcatattctaaagggaaaatacatggcatctctgagcactggactcagactatccactataaatttgaggtcatattttgtctagatggcatttttgggggtcagagttattggtttgatcatatagggccagttagctttttcttggactctaatcattgtaaccatatggttttcaatatatgcccttagtcacatggggaagcatatgggagtgtccaagaggtttagtttaaaagattaaaaggcttgtctgctttctgaattatttgaacccgtcctcataggcaaaggtcctggaattaaggacagactaatataattactgggtaatatgggaaagctaccttgaggaagtggaggtggaatttaactcccaaagaaggaaaagaatttgcataactaccacaaagataaaagattagaattctggaattgtgtggtaccctttagaaaggcaatcagggcaagtgtgagataggtcaagagagggtagacatatcagtggcaggaatgtggaaaagaaaccacgctagactggaagaaagctatgcgaagccaaccataagtaattctgattttaaaatttcaaatagagtgtcttttaaaaaagtagtgcgtgttttaggtatgcccattattttctcacagcaccttcttttggaacaatctgctctgcctagatcaatcaaattcttgttttctgaggatgtggattctacggaagataggagactgggtctgtcaggtgttagctcctggcactggaaagtcatgtagagcaagaaatagtatcgtggtaacccaaagtcctgtgcaggctgaaatcactgggcaacagtaactaagatctttgtagaggaaacttcagagaggaatgaagcaagagatcatgagatctcagaaggaaggaagcacagagacagggaagattactgctgtgctttcccattttttggtattctcccaacattgggttctctaagactccactgtattcttccaggaaatcttcatatattcaaaagagactgaggagatttctgttccatgaaatgcaacagtgcctcacacacagagagatgaaaggaagacaaacaaattcaaaatcaaaaggcctccattcgagtcctagctccatgtgaccgtgggcaagttacataacctctctgatacacgtgctgggcatctgtgaactaagggttaggatatagactcctcagtgaggctacagggattaaatgtgaaaatggtctgaaactgtgcctgtcatacagtgaaaccctcaaaaaacagaatataactgaataaaataatgcacaagtatagcaattttaaaaaactttaccacagtattatgttcaattaaaacagatttttgtggaaaacatagctattctttgagatgctacacatgtaattctataataaagtaggcacatgacacacagaaaatctctcatctaatgagtggcttaaccccaccggaatgacacatacaaacggacataatcaaaaagccgggggtaagatataggtatagggcccaagaaaaaagatggtatgtctcaggttttaagtaggggtagaagggcactttaagttcactctagagagttttatttcctctaacaactaggagaggtggatctttcattcattttaaactcttttagcactactctctgcaggaatatgatgggaaagaacacatgatcaccattcctgactcagagcccctggaacaggtctggtcaccaccacaatcacagttgcagtggacggtgaaaaagcacttggtgtgaaaataagattttaggagctcacgataggatggcaaatagggatacattgtgatttgagggtttcacttctttctttcctacttggcccatgatgagggaaactagatctcaagattcaagaatatgttgaatccttatctatttaaatttagagatttaaccaagaagtcccattgtaaaaataactccggggctgagatgtggcgatccaaattcctgaaaattgttaacccccaataattcttactgccttgaattccccaggaatgacagtatatttctaatttccaggtgtgctgcggctaacttaaacaagataaaacacctttcatggtatttaaaaacaccagtgggttttctccctatagtctccactcccagctcagaggactgtaatcctaaacttggagcaccatcttagataagtgaaagcggagtagataattttgaactggatccatcttggaaatttgatcggagtctgagaataccgcctaggttgttcctgcactgccgtcgggagccaacgcacctgggctcttgccagtacttgctttctgcccagtcaccagatgcattctgggatgtttctgcccacaagcaaaactttggcttgtttttcttcacagcaactaatgcctcagaaaataaaaaataaaaaaacaacaacaacaaaaaaaataactctggctttgcagtttccctgctgcctttaaacctgtaatgctaaatgacgtgcccacaataaaataagaataagtgctcttttctccttttaaaaatcaccagtggctacaagatctttggctaaattgtccaaaagtccaggtgttctctctcttgctctttctctgatatatacacatgcatttcgagacaaacacccttatacacggttgtaagacagtttcaactttatttgacagctgtttgcaaatttagccctgttactgaagcatgcattcaccagctggctggtgaccatggaaaactaataaatacttaaagaggtctccaatcagtgagcaaagaagcttagattgatactatgacttctgagttttgaggcaatcaccagtaacatagaacaggccaattcagagaggacgtgcaaaggggaagaaaccaaaaacacacaggttagaaccagcaattggctggatcttttctcccagagggagctgtgttcaaaggcaattcacccacagagcctggatgtgtcaccagccaggagctctcgctgggcattctaagctttgtttctgtttccttgactgctatttgtttacttcaaggctcataaacttgcctcttgatattttaactcccaatcctgacagtgacaaaataccccaagagatggcttggctaataaagatcactagatataggctaaaattaggcagggtggggctgtgaaaataggtattacattaacgtactaaagagaatgttgaaaatccacattcttgtgccataattagaataacattgtaatattctggcatctatattttactcgtaaaatatgaaagcaggtaaatattaagaatttaataaatatatacttaatataaaatgaaggaatctgaggaacatgctccaccaaattgaattctatggaattttactgtcttgtgcattagtaatgtgtgttctatgggaaaggaaggttgtggttagaaaataatgtactagacatttttttgtttgcttgtttgttttactgtgggtcttagcaacacctgtattatatcgacatacacatcttcatcgttccttatactcatttaaccacagaaccattttggtgtatgtggtgaaactagattttgcgtaaatcaatttggaatgtcttctactgaacacatcttaggaaatgttgatctaaggaaaaacgcaaaatagataaaaattatgactagatcttgaataaattcaatgttttaaactggttcaactattcaatcgcttagaactttctcatccaaagcaatgtgctaggcacttaagccctatctggaggaattcacagcaagagacccatataccaagcttgctcttactgcatggtatttgtatttgctgtttcctctaactggaatgctcctcctcatggtccttactttatctgggtcacttctccagtgttgcctatagagaagtcttccctcataacttatctaaaatagcacttccatcactctctaactctctaccttgcttaatttttttcaaagtacccaaaatgattttatgtatttccttatatacttattgttcatctactctattgaaacctagccctatcaaagacataactgttttattcaaccttgtatcttcagcacttagtatagtatgtggcatttagtaggtgcttaataatacttgtcaaatgaatgaatgaataaataaatgaatgaaaataattctaggccaggcggaattactggtggcacacatctgtaatcccagcactttggcaggccaagttcacttgagcccaggagtttgagaccagcttaggcaacatagtgagaccctgtctacacaaaaatgtttttaaagaattagtcaggcatgatgatgtatgcctgtagtcccagctacttgggaggctgaagcagaaggatcacttgagcctaggaggttgaggtttcagggagccatgattgcaccactgaactccagcctcagtgacagagcaagaccaactcagaaaaagaggagaggaggggagaggaggagacagaggtgagagaagagagaagagaggggagagaggaggagaggaggggaggggagaggagagaggagacaggagaggggagggggataagggagaggggaggagaggagacaggagaggggagaggggaggagggaagaggagaggagggaacagaaaagaattccataaaagtaacataggaggagctagaggaatttgggttgaggctgctaagaaaggctttatggagaagatgacatttgagctttgcattgaatatgggaaggtttctgacatggcgcaaatagaataaatagtttaggataagaaagaaagcttaaaggcccagaagtagccttgaaaaagtaacctttagacaggcaggaaaagagatcatcggccgggcgcggtggctcacgcctgtaatcccagcactttgggaggccaaggcaggcggatcacgaggtcaggagatcgagaccatcctggctaacatggtgaaaccctaacacggtgaaaccctgtctctcaaaatacaaaaattagccgggcgtagtggcgggtgcctgtagtcccagctactcaggaggctgaggcaggagaatggcgtgaacccgggaggcgaagcttgcagtgagcagagatcgtgccactgcactccagcctgagcgacagtgacagagcaggactctgtctcaaaaaaaaaaaaaaaaaaagatcatcacaacctggggctagcagcctattcgctgcactcaggaatgagacacttccaaagcaacacaagtcctcaaaccggggttccctttagatgtctgagcctggcctattctattcatgttttcctggttcaatagtttgttcattcattatattatttattatgtgccaggtacacttcaaggtgacagataaagcagacataaaaatcctggcattcatagaacttacatctaatgaggaaataatataataaatgtcataattatagtacatattagaagatggcaagcattacagaaaaatagagtaacagagatgaaaagtgttggggtaaaaattgcattttctaaactttctattgcagtataatacacacacagaaaagtatcatatcattaatgtacaactctgagtttgcacacaatatatgacctttatgtaactagcttggagaacaaaaaacaaaacattaccaacagtctaaaaaacctccttggctgggcacggtggctcacacctgtaatcccagcactttgggaggccgaggcgggtggatcacctgaggtcaggagtttgagaacagcctgaccaacatggtgaaacctcgtctctactaaaaatacaaaaattagctgggcatggtggtgggcgcctgtaatcctagctacccaggaggctgaggtacgagaattgcttgaacccaggaggcgggggttgcagtgagccgagatcgtgccactgcactcccttctgggcgacagagtgagactttgtctcaaagaaaaacaaaacaaaagaaacctcctgtgtacttctcataactaaccaccctgcctaagataactattattctgttttcaaatagcaaagctcagtgctgactgtttttgtacttttatttatataaatggaattgtatattatgtatttttaatcaggcttctttctcttcaacattatgcttctgagattcatccacgttgttgcatgtagttgtagatcagtcattcattgtgattgctgtagagtatgttccagtatgtgattataccacaatttatttacccttccagttgctgatgggcacttgggtattttctagttgctggctatcctaaatattgctgctatgaacattctgaacacatggattttggtaagggtatggattttcaagtaggttggttacagcagggctcattaaacaggtgatattcaaggccaggtgtggtggctcacaccagtaatcccagcactttgggaggctgaggcaagtggatcacttgaggtcaggagttcaagaccagcctggccaacatagtgaaaccccctctctactaaaaatacaaaaaaaaaaaaaatttagccgggcatagtggtgggtgcctgtggtcccagctactcaggaggctgaggcaggagaattgcttgagcccaggaggtggaggttacagtgagccagcctgggcaacagagtgagactccataaaaagaaagaaagaaggaaaggaaggaaaggaaggaagggaaggaagggaaggaaggaggaagggaaagaaagaaagaaagaaaaaagaaggtggtattcaagcaaaacttgaagagtctatggaggtgatccatggtcatctggaggaagtgtgttccattgcgtttcagtcagtaggaacctccatcaggcaagagtgtgcctgatgtatgagaaattgtaaggaagccaaactagctggagtgagtgattttttttttttctgaaatgcctattaaatctgtcctttctcccagtttccattgtctgcctggatctagcccttctcttttttctttcttttttttgggggacagagtttcactttgttgcccaggctggagtgcaatggcgcatctcggctcatagcaacctccgcctcccaggttcaagcgattctcctgcctcagcctcttgagtagctgggattacaggcatatgccaccacgcccggctaatttttttttttttttttttgagacagagtcttgctctgttgcccaggctggagtgcagtggcacgatcttggctcactgcaagctccacctcccgggttcaggccattctcctgcctcagcctcccgagtggctgggactacaggcgcccgccaccatgcctggctaattttttgtatttttagtagagacgaggttttaccgtgttagccaggatggtctcgatctcctgacctcgtgatccacctgccttggcctctccgaaagtgctgggattacaggcgtgagccaccatgcccatccataccaggctatttttgtatttttagtagagaccaggtttctccatgttggtgaggctggtctcgagctcccgacctcagatgatccacctgcctcggcctcccaaagtgctggattacaggcgtgagccagtgtgcccagctgccttctcttttttctcagggactactgcagtaacctcccgtggtcttccccactgaggtcagagccacccttctcaaacccatacgtaaccatgtcacacttttatttaaaatcccaatttagctccctaccgtataaagtctaaagcctttagcctgaaaaccaaagtccttcaccattggctcccatcctaccttttcgtctttaagccaggcctgttccccatgaagccttttctccatcttccttatttacctaatgtcacaaagctcaatgaagtccttgttaagatgatgcttgttaccaaccaatcgttaacgttcttttttttttttttttttgcgacggagtctagctctgtcacccaggctggagtgcagtggtgccacctctgctcactgcgtcctccaacttctgggttcaagcaattctcctgcttcagcctcctgagtagctaggactacaggcatgtaccaccacacccggctaattttttgtatttttagtagagatggggtttcaccatgttggccaggctgatctcaaactcctggcctcaagtgatcttcccgccttagcctcccaaagtgctgggattacaggcatgagccaccacccggcgaatccttaacattctcttgtctgggtaccacctttaatttagtactgggttctccagggaacacacaaagaacaccatctttatcttagatcagctaaattattactttacttttatatcaacggaaggaaggaccaacagctaatactgatatcattttacaaacaggaacacaaaagatcagacacattagctaatggatttgggttctaactagcaaaatttgcttcctgtcccagaatcagcactatgactagagagtacagacagggaggtccaggcagaaggtccaatccccctgtccaggaacagaaaagtacttcaaaagaaggaacaacataaagaagccttataaaagttctcaaatggaaatgagaaaaaaactctgccatctgggctacagagaaagagctacaagggctgccaaatatactttaatggtcactggtggaaacctggtctccccatataaagggaaaggattctggaacttatgctgcacacagatggtaaagtaatttgcatttaatataaaaattttcccatcagaggaagaccagaatcgatgagaaatccctgttcatttcctctggttaaaacaacaacaaaaactaaatggatgatagaatgtctggttgaataattcaactataacaaaatattttttgggcaggcaattattctgcatgaagcactgcactaagcaataatggtgccacagaggtgactatggggcagtgttttctttctaggaactttcagttgaaaggattagaaaaacacacagtaactatcctactaagaagaaaataagaatgccttccaacagaggcattcaaagaaagggttccctaagtgctggtggtaactctggtagtaacttccataatggacttaaaataagtagatgaaggtaatcatctatgtcaatcaggtgagtaatggcccagggcctatggcccatggagacaaaggcaggtgtggagtacacaaagccagagggaaatcctggaaatcacaccttgtatgaaggttacaagctaaggtaggaatccaagactgtgttgctaaccaagggactggataaacaatgggaaccaagctgtggaacaagaacagggcccgaaaattcttgggtctcagaagtgctggggtatctggctgggcaagagggaggcgtgcctggaagggttttggtggtggactctaggtgccagcagcagtttttcacatggttgcatggatgccttaagtattttgtagaatataggacagaacacacacaacctatttgtcatgacatgtagggtggtggtaaaggttctctgctcccagtttttcccttccctgcctactgcacaaattcaaccattctttgggtataaaattccccccattctctcccttcctctcctttcatatggttattgagtatatattatgtcccaggcattgtgctaggcttaagaattcctattaaaacacaaataccctaggagaaaccttaatcttggcatagagggagtgctcaataattatatttggaatgaatgcatgaggccatgatcagctaacatcttagaaaggattgtgactgcaagccaggaaagagcaaccatgcaggtagctgggatgatatacaagcattagctgctgaagtgaatcaagagaaaaagaggtccattggcaagtttttctgactgtacaattttgttcagagatgaatctgtctcacctatttggaaatgaaagttgttgacgaaaaactaagtcattcaactccttgaagatgaggtatttttgtcttcatccattgtaatgaaagggctcttgttccagataaaagtatcaggatgactttcgtgaatcaggatatgcctgcacttagtgtgagtctcttgatcatgcacactcttaggacaggaccactgcagatacactcatggaggttttgcctacacaagagcacttggttgaaaaagcaagttaagactgaaatatatccatcctgcacttcaccaagccttgcacccagggtgggtgggtggagatgggggtggtggtggtggataggccctaaggaagagcagcctttttctaatttgctcaaaggttttcctgtatctggtgatttaggtcatatggatgtccctggtcacccgtactgagcaaagtcatttttgttcatcaagttctatattaactgttggagctagaacaaaaagccattctttatctgctgtgagagagtatggtgcctgcatattacggaatcagaaaagaactgaggctaagaagacctgggtgaaccctagtcctgccacttcctttttgtgtggcagaggggagttcacctctcagcctcagtttcctcatctgtgagattaatgttacagatttgggaatgtctgagatctccccaaacctcagatgtctatgattctctcctaatgccatcaaagattaagtcctttaccccttcaatagtcctttcttgccattcaaaaccagtttcaacaaaacaaaacaacaatcagaaagaaaaattggtgtgtatagaaagtaacgtttgggctgaaccaaaattctttggttcaatttaattcttaatttaagaacaggtcacagagaaaacaattcaccaaataaaaggaatattttgtcactcagataactgagttaaacagagaataccctccaagtggatgaaacttccttgtagagcctagaagataaatcgagacaaactggtgacctcaggaaacatttgattgccaaagtgatgtaataatgggattttttttccctcgtaaccttttgctgcccctctttatttttctcccagtcagcacacttctgttttttttttttttttcccccattcctgttattgtttttggttttgcccttggccttctgttttgttaggtcttatttctgaacgaaaggctgctaacccacagaatttacttttgaaagaagtgaacgatttctttctccttctccttcacttgcctcctgccatgccagcaggcagcgctgcttggtaagagaaactggcaggagtatgcgtctgagttgggggaggaggagagaggggagcaggcagggggcaggagggaggattctgaccagcgcaggtgaggtagaagcagagctaatgagaagcatatgccgccaaccattttaaaggcaggctcgagccaagagacgtgatgaattgcaagaatgtgttgtgttcatagccggggagctggcagaaatagcccagctaaaggactaggatggaagggttttttttgttgttggttttttttttcttttaagaactcaggcttaaaaatacatttctctttgtcagcaaaatgttctagtttcaaaactatgaatggtagactacctctgtcagactaatgcttttctttttacctcagatactgtaagatacgagttaccttcaaattaaaggtaatacctataccaaatagacttagatgatagcagctctgagcaacttgggacattctgaatacacaggacaattctagcccctggatttgaacaggtgaactctgcttacatcagaaggccctgaggaggacaggtagaaacagagcaaaggcccaggaagattttttccttcctttccttctctttccaccctctctccttctctctctcccttccttcctccccaaattatttgtaaagtatcttctaagtgtcagagtctgtttaggaaaagatatggtggagaaatggaatctaggtatcacctccaaaacctgtgccctccagatcacccaggaagttgacagaggctttccttcagaggcctacactaaagctctctcaaaatgtttagttggcagaatcatagtccctactttccaacaataagtttgttagaattgactcttgagtaagagcttagcccaagactagatcaggaccttacaatgagaagactgtatttttaagttgaggctatcaataaatagacagaaacaaaattttgcctttggtaccttctatcttctttttacatgtctaagtttgcttgtgttgttcctggccactcagtttccaactgacaggagtatagtgtccacatagatgttgtttactcctgcttcccctagtgcctggcatagggctggcacttaatagctaattaaatagttgttcaatgaataaatgagtgctttcccttcaaatgcccctattctaaatttcctttcactttcttgttgctcaactaactcacctcccaacccaaactccaagcagttttatctcaaatccttgttctgtcattttataataaaaaaccttgggcaaattactgaattctctaagcttcagtatcctcttctttaagtggggttaataaaatttactttacaggtatgctttgaggattcattggaaatttatatacagaaaacttaaataaaatgccttgtccatctcttggcatgtagtaagcatccaaaagagactgattacctctttcttcttttcaccccttctgataatctccatcaagtattagaaaaaaaatgtagttaaaactaggcttgttggccgggcgcggtggctcatgcctgtaatcccagcacgttgaaaggccgaggcaggtagatcacgaagtcacgagctcgagaccagcctggccaagatggtgaaaccctgtctctactaaaaatacaaaaattagctgggcatggtggtggtgggcacctgtaatcccagctactcgggagtctgaggcaggagaatcgtttgaacccaggaggcggaggttgcagtgagccaagatcatgccactgcactccagcctgggcgacaggcaagactctgcctcaaaaaaaaaaaaaaaaaaaaaaaagaaaaaagagagagagaaagaaaaaacaacaaaaaacaagtcttgttaagttatgaatgaggaatgagtctaatccttctagactacagtagaaaatatggaggtggtaggtggggtagtttgagaagccaagacgttttagggttcatacccactctgtgctatctccatcctccatgctctgtttggacagccagtacccactctagttacctcagcacttcagatcaggtgtcataaaaaggtgcaccacttttaaaaggttgctgacacccccatacactgcagttaacattattctaacttaatttaataggtgagcaagttaatggaaaacaatgaaatctggatcaagaaataagaatttataagaatcaaaatgtagtataaaattacatgatcaaagaaaacaaagtaaatccataaatgttcattcccaatgtttatttgatgtcccaaataaataaagtttaggaggatgaaatcatgccaataaaatccactctgaatttttttatacaactaattttttgcactgtaatttaggcagaaagaaaatgattttaaattaaaatttttaacacatataggtaattaaatttatgtggctattttctaagaaaatgtcttaagaggagttcaaggaaataaagtataaaatttcattaaatttaccttcattggaagaatatatgatgaaatagatttttaaagtttcctaaagaaactgttattctatctgacagaaccaaagtctttctttttttttccttctcttagattggcatgacctacaagaaaatacccatttatggtttccaaatgccaacatgtcgacatttctatattttttccatccttcatgcaagttttaaaatttacttgacaattaaactgcctaatttagaattttgcttgccaattgcaaattctttcgttgcacagatctatgaattaatcagaacaaagtagaaaagtgctagccatagtggaagaatttagtttaatttttcttcttggcaggaatatgtgttcaagtacattataagcagacaaaacatgtagctgaaaattttttggaagagctattaaactttccactataatgaaccagtgatgcttctaatatctcaaatagaattctattgatttggaacctgttctcatgttacttagcaggtcttcaaggtagataatgagttgtaattactatttcctttaaaaggacttggacaagatgagctgcagggtggtgacttcagaactggcatactatgctctatttttctttactcctctttgtactttgtgtccttttaaaatcatttgtattatcaactccattttagaataggtaataatataaagtagagaaatttacataaaatgaagatttccctttgtctcacatatattttcatccaaatttaactttctttccatttcaataaagtcccttttctttttttgacaaagaaggtaaaagtaatttttaaaggaaacatggaatctgttcccagtgtgtttatagattggcttaatagaaataatgcatagtttataaagcatctccatgaagatatcactgaacacaggacataggatttggactaacactaaacctgactaaactcttggctccactatgtatagctgagcgaccgtgggcaagtgttgtaatctctctgagctttggtttttgctaagaagtaaggccaataatacttggtgactaatcaagaggctgtaagtaaagcattttgcacagtccctggtatacagtaagaatttaataaacagaaactactattatcatccaggcagaagaataaatggagtacttaatccttttactaattcaagtgtgtgctaattgaaatctctaacacctcattaatgtggaatgacttgggagtttagtggttctcactggtcaaaaatttccctaattacttaaagatgtttattatcattaataatttaaatcagggaagtcacgacttctctgagctactcacttaagtagatcaaaccccatccaaccgtgttggaattcactcacgttctttccgaacagtaaagctaccatagatttttaccatggtcctttcaactttttacctctctgatctcattttattccattttaccctcaaaacaacccagtaaggaagggtaaaactcaaaagatccttaccggtgtggctcctggacctatttaataatctattaagatcatacagatctaaggaaactgacatccctgggtatttatacaagtgagtgtatgtgtgagagagtcaactacacttgagttctgaagaatgggactgtcggtaggggctgatgtgaagggcaggcatagggtgaaagatcactgggcttgactcttggttgttgaagggaggacaccgactggcaaatatggccatgcctgtattattccactctgggacatatttgtggcatatatgagatgtaagaatgaatccttcacagggacattggatgggtttttcaggctatgtagtaaataactatttggatggtgcaggcaaagagttaacaaaaactcttttcctttttgcatgagaatctgacctttggttaacttcttaacttggtttccctggaaacagataaagatggtatgtgtcaactatgttactaggcaacattgcatatggtaaaaatgacccctcattggtagagtgcatctggactgggaggaactataaatgaactgcaaatacctgctggctatgctttggacttccctgaatgcagcagttcttgtaactagcatgtctctggagaggaccttgcaaactatgtctatggagttgttacaagagttactgactcctatgggaaataaggctcttaagtaaaggcaattccttcacctgcccagtgtggatctcatcatttggcacccgagcttccatggctctaattgcagaagaatacctgatgctggcctactggcaagctatagttctgatcctatattcttctgggcagactgatgtcaaatgtgatgtgtgatagtcttaggagtctaaatgtctagctgagcctaagaaatccccctgctggctgttgcatgttggtttagtgtcatttcctttggataatctgtgaggcatgactttctggaagagatctgaaaacaaggaggtcttctgtagtgcctttatctatagaaacttaaaattaattcatccatccatctatccaaccatccatccgtccaatatttatttagaatctacaatgtggtaagaattgtggcagataaaacatatattcaaggtcctttctctcaattagtcctcacattctatggaaggaaaagaggtatatattgatcattagtaataccagtaatactaatatccaatatttattaaataccagatactttgttaaaccctttacatttaatctttagtttgaccctttcatttaatccttaataagaattctgtgaagtatgtattattctacctactaataatactaatgtgtattattctacacattttatagacaataaatttgaggcatgcagaagctgcctcaaggtcacacccctagcatggcatctgagctcaggcagtctgattctagatctcatgccctcaactagtgtgttatttagtgtgatgtgcaactaaatagaggttcacatcaaggacttcattcaacagttttctatgcagggtcttctgcctccactttcccatctcctcaaatgcctgaaagcccaccagttaaaattaatttgcgttaacaagcaaccattcaggaggcatcaggagaaccagggagataggcaaagagcagaaaaagggcaaactttacctggatttaattgtctatcagttttatgcctccctgtctccagagatggcttaaactactctctgacccaacttgaccagcttccttgtccagttctgaagggcctggctcacaattaggcagaagtgagcattgtggcattgtatgtcttcaaggattccgtttagaaactagactatgagatgaaatgaaacaatgcatgtaaagtgaccacaactgtacctgtcatgtcttaaacactctataagtcatagctattattattctttcttcctgtattgcttgcaaaatgctacaaactatcagaaagtcagacctctcagtggctttagcacctagtattattttcagtcatatacattctttgcatgtctgtcaggaacatatttgttaagtgcttgttgggtgaaccaaggtagtgactacagaaagtacagggagccatattaatcaatatccatatgatacatttaggaacacatactaggaaatttgaaaatgcattaagaacccttaccatgaggcatctaccacatggaaattgtcaggtctccagttcttactccccagaaaggggactgttttgactacagagaaaatttgctattattaatgcttatcaagctaagttcatacagaaataagtaagagagtcaggagccactctcctctttgtcacactccttggacttaacgacaccactctgcttctgcccagtttttagtaaacatggccttcaccatcagccaaccttagttccaaacacttctcaggagaaaccttaatgataggctgtggttcctttttatccaccagagctgtcttgtctgatatcacattgatgccctgtgtcaatgccatttggatctttcctgtgtatagagtcttagaccaattttccattttgtgagtttccttctgctcctaacaaagaacagagaaatgctctccacattctgcttccagagctgctcaagtctctctgaagattcagtacctagtctaggtttcttttgctgggggttagattctgaaacattgagttccctggcttctttgcctagaatgaagcctagagccagaaacgatctaaggcaaagatctcagaagaaggtcccacctcaggtgatgagccttgcctggcctgaagtctagggtgagacttaagtgctggactgtcagcatagcttacatttcacagaacaaaccagaactccattcagcactccacttacttcatctggcaaacattatgaagcaggtactgtactaagtttggggaacagaaagttggcaaagacaaggtgtcttcccttgagaaattcaaagtcattaattgttcatgtaacacagaatacattcatgagttcatttttttagaaaaaggaatattgattctcaaactctcatagagaaatgttcactacttcctctagcctggagtcctaaaatgtctgactcaatgaagaaaaatgccaactgccactagagcctactcaaatgaaaactctgtagcagaatgatcttgattatctcagaaatccctgacagaaatggaagcaatataaataaacacaaaagaaaatagaggtactgtaacacaactataaattgctcttctccccgactttcttccaatcatccagggcaaaagaaggaagttggtctttgtggcagagaatagaccagcagctgttctctatcctgccaagaggggagagacttattataaacaatagccaacaatatgtcctttgggacgggaaactcagccaatttggagggggccagtctggaagagagaaggagggttaatgggatgggggggtgaccaacataacagaggatgaattaggagaaaacactatcaaattttcctgtgtacttatgtttctattacctcattagggtgattacataatgtgactccatttataaactaagagggaaggaaggggcgacattctccttagcggtggctgatgtgagacattaacataccaataagtcatgtgggcaaacagttaacatgtttgggaacatctttcctttctctcttcatctgtttggtattttgtctgctccttccctcctttcagccatatatgtgtatctgtgactcagaaatggaaatggagctgacaacttgggtgccgccattttgagagctcttcatgtaagaaatatatggagtttgttttactgttttatattccattgggagaaaaaaaaatgaacaatcttacttacatgtattactatgcatgggtcccttgcccattcctctctgcaaaatccccagaggagttcttagccaggtgcagattggaattttaaaggttcttatttcttaggacatttttctacatgtggagaaatgccattcttttcacagactaacttgtcagtgtcctgattctaagtagtaactctagacggggatattttaggggaatgctgtttatggatatactattaatttgtgccttaactttttaaatagctcactaggacagtaaaattcactgagtgatatttaacaaatgaggaaaatgggtttcaaaaatgtgaaacaacctgttctgatagttagagaaggaggccagactgcgatcctgtaacaacagcagttatacagaacatgactgtaataaacaatttctaagggaggttggacagtttaaggaggggttcctttatccatgggttcttccaatgagggagcagtgtgggagtgtgacggtgttaagtaggaccaattctatttaaaagggtccctcagagagagagaaaaaaagaattaactatttagcctgtatttgtcttacatatggttttaatttgatatacttaccctttgttcccatataaccatattaacccttccccattttgttatattacttctggttttaattttgggggcttccaaaggcatttttgcagttatcatttctcagaagatgtgcactgattctgtttgttcttatgatggcaaactaaataaagagtttgaggatctgcattacacatgaacaggaagggatttctttattcagattagaaaaaaataaattttaaatatttctattgtagacagtatagtagggagatttcactctacctggggcctgggaagtagtatttacttaaattagcaatcagtccattcatttagatctactgttccatatgttttctgttcacattattttggttacagtatcttagctatccagcagatggcatctgcttcaaaactctcctaacttccatttacatttcaggacaaacaggatactgatacattgaaacctcccttaattgacttctacatttagtacctagaaaaggttgctggaaatataattaagggtagaccattcattccctttttcttggtaagagtcatacttctctcttgccatgcccatggcactaccatggacgcctaagaaaacctcaataatttgaaaggaaacataatcagaattaaacccacaagctctctttaaaaatctattactttaattgctttcagcactacacaagagcttagtattaatggcagatttagacaagcaaagctaatctcaaacctcctctaagagaggaaagaggcaggggggaaaaaaaagagccagctactccaagaagtgagggtaaatgaatacacaaagctttatgcatagttaccatacagagccttttctctctatactttgtatgaaaagatgggtgtgattgaatgacttctaacgtttaatgacacctttgctccagtgctttgtaaagctcacacatgaatacactgatccatttccagatgatcctggggcccccatccttttgtgtcaagcacaaagaaaaaggagagagagggagagacagagacaaagaaacagcccatgtaaccaagcgccgaacatgatttgaacaaccaacttagtaaacatcaatcttaggctgtgttatgtgaaatggagtcatactccaaaagaaatgttggctacatttaaaagatcactttgtctaaagaaaatgccaagttgaattttcatgtactaagtcatctttctacaagaagctgacaagacaaaagcaacaaagtgaaaaggtaaaaaatggctcatttgaaaaaaagtaatagcattataaccttttttttaaaagggtctggtttccttgttttatattatttgtcagggatcaatgtggccatgacaaaagcaatgggttagaaatcaaaagacttgtgtgacttgctgtgttactttgtgaatcacttcacctccctggaaggcggttttcatctatgtaatataaaggatggaaccaaattacttttgggttcaccttcagctcatgtttgttctaacagggcatccctgcccccacagggcaggctcttagcactcatttgtgagtgtgagtcataagaaaggatggtggagcttggatagtggtggggtctggagctagtttgcccaaactgagccattggaaaggattctaaaattctgaagcattttagaatcctttgggtcacatgttctctcttttagttttatggctattttctgaggaaaaaaaaaaaaaaaaaagcccaggttgggaatccaaagtctttgacatgaatctcttttgttctaacttttagctcaaaataaagtgcatttgaccattcaattctttatgtgtagcatcatgcacattcatgaatctctttaaatctggaatttaaaaatgcctgacatctcctgccacagccgctgttaatatacacaatagattcttcagaaatgcaaggttagaacatttgaagcatgagaatactgatttacatggaagctgagagtatacagtatcaataaaatgtacctttgacatcttggcttccagagaaatacactttctttgttcattcacaagtctactctatttccacctcagatttaattatcttcccagttctcatttgcgtatgtgtaggctaccattcacaatacaccaagccctacgtgtgggaggcacaaatcttttcattcaaaaaataataatgtggacaagccattttgactgcaaagtaagtgctttagacaaaggcaagaggatgttaattgtattctaagaataccaatgtccttgaaatgaaatttgttgtttggtgtattgatctacatcagtagtgtagactttcaatgatctagtttcaccttctgagtttgctgattaaagaaatgcagcccgagaagtataaaaggtttgcccccaaatcacccagatctacagtagcagaagtaggacaagaacttggggttttcttttttgtttatgacttacacactagaatcagttatacatccatgagtgccatggatgccaggatctcactactgctgtgcatcctttctgtttctctgactctcaaatttattctctttgaagtgagctctctagaagccatttcgttcctgatttggagttgatatcccctgcatgcctctctcacatccttttaacttctcctaaatgcaacttaagccaaaataacgtcatttatccatccctccatctcttcaatgtctgtccatttatctatccatctattcattcatacatccaggcatctatccatttctccatccaaaaacaaacaacctcagagtgtcgagtcctaatctagacctggtaaccaaaataaaatagtattgttcctcaaaaagctcctaatagagctgagtttgctcctgaataatctttttaaaaagtatgccagttttatagtttttcttaacaattattttaaaaagattcacattattacgacaaatgtttcactttccttattttctaaatacagcaacacttcatctatttggctttggcagagaacgaggtgttccacaaaagtaaactctgtagaccactgaaaccaaaacttctgaacagaaatcttccttaaagtgcatttcatacttctctgcctttggaaacaaaatataccaaacacaatttaatctttttcattttacacaactgagagtgatctttaaggaaaatccactatcatagtggacagggatattgttttgtatagaactttccgggtttctcttttaatatcgagcagttatcacttttcactgcaagttgtgcttccttccagcagtcctttcatgaactcttctaatttgcaggaccaggaatcagaaaattcactaaaagttaggtcttaaatctgtgtcagagccaggaaggcctcaagtaagggtgtgaagtagagtatccacatggttttaatgagtagatttggggaccaaaattccatactattttcttctgactacttccaaacttagaataatgtagagagggctggggataccatgccttctggcaagctggccagtgccagtcagcctgattggagcctttcatcttatccccagaaaaggaggcaatgatgaggccatccaagtccaagcagtttttgtttgtttgtttgttttgttttgcttgttttgtttcttttgagatggagtcgcaccccgttgcccaggctggagtgcagtggcccgatcttggctcactgcaacatctgcctctcgagttcaagtgattctcctgcctcagtctcctgagtaactgggactacgggcatgcgccaccatgcctggctaatttttgtatttttagtagagatggaggtttcaccatattggccaggctggtctcgaactcctgacctcatgatccacccacctcagcctcccaaagtgctgggattacaggcatgagccatcacgtccggcccaggcagttttaaacaagagcgagattgcctctttgaggtaccttgtttaaatggaacccagttctttctattcctgttgtaggagccatcagaattctgcccatctgcctgccagaatatttcctgttccatgagttatagtccaacaatcccagcttctacttacagtgcaacctactgccaagtcctatgccaagcccttctctataataggatttcctacatctctgagagtgctactatcttattttaaaggaggaacttccagcctggccaacatggtaaaaccctgtctctactaaaaatacaaaaattagctaggcatggtggtgcacacctataatcccagctacttgggaggctgaggcacgagaattgcttgaacccgggaggtggaggttgcagtgggcagagatcgtgccactgcactccagcctaggtaagagagtgagactctatatcaaaaatgataatagcaataaaaaataaaagaggaacctgaggcacagagagtttaggcaatttacctagggtaagttagtaagaaggtaccttggactcttagcttggttctctttgtcacaaatatttacatgcataagatggtaattctgcaaaactatgacttaaatggatgatagaatttcatgatcactttaaatttatacttcataatagcactaggttataaaataagagctgcatggccataggtgagtagataaaaagcaatagtttaaaaaatcaatctggattgtagctcattccttgtccatttgcagactttgagtcagatttttaaaacccctactttcttgttctctgtgcatggtttatgataaattgtaaggttgaggaaaacagaaagaagtcaatgttatgtaataaacatagaagtgaataaaactatcctatttcgtgtacaagttgagtatcccttatctgaaatactagggaccagaggtgattcaaatttctcttttttgggggtggggaggattttggaatatttgcattattcttaccagttcagcatcctaatccaaaaatctgaaaaccaaaatgctccaatgagcatttcctttgaacatcatgtcggcactcaaaaagtttgagatcttgaagcattttgaattttggatttttggattagggatactcaacctgcatttcaaaaatgtttattgggaactggtcatgggatagacattttcctagtcacgaagtacttaaggatggaagaaaagtggtccttgcccttgagcatctgacagccccaagggagatgtaggattgtaagtaaaccactagatcaatgtgttaagtgctaaaagagaaatatgctaaaaggtgctgggggatcctaacatttatctctgctgaaggcgaagatgttcaataagctagtgggtctagttggttgaataaagccaagagggaagaggaagagtacttcaggtccagggaacagcacaaaggcatgaaggaataagagcttcatgtggtagaagctgttatggtaaagtgaggcaagaactttatgtgttcaagttgaaaatcgttttgtaaggttataaatgcaataactaaagaaatgtatgattaaattttctggcaccattttaagtagacaaaacatgcagttaagcttttcagaaaaactagtaaattttacagtacagtaaaccagtgatgtttctaatataccaaacaggattcaattgatttggaacctattcttgtgttatttaaaatgacttcctcaatttacaattttttgtccctatgtctctatacgtggatccggacttgttagaccatttgttctatttttttttttccagaaaagatcactatttatgttatcgcccagtacaaaatcacccacatatctattttatgacatttcaaatataacagaaacactgaagcatgcacagaggccccagatctaaatgaaaagacctaatgagaagaaagtgggaatttaagtgaaaattgcacggtagcacacttctgtgagtacaaatgtgctgcaattcgttaaagctgaggccttctttttggagaccaaagtgccatttcaatgctactactccctgggagaaaattagggttctttggcaataaaatcacctctttaaaatcactgccaagttttagtttattagatggtagtcttgtggctgagatctaagagttcttccttttaatactgtaacaaagcagtagctcaatggataatataattctgtttttttaaaaacataacttgtttttcatgaggccagtctaaagaagcattcttccatgtcatagaaagagagactgagaactcaagaggtttagtgatctctgggtctgatgagaaagtggacctagaacgagctttcttaatccccaagttattctggctctgaaatataaacagacacatacatgaaagaaagcaaaatgaagggcagctgtgctcctgtgtatctgatgatcgggaacaataattgtttgttctatgatttctccttaaggaacttctctgcaggttgtcgaattcccaagaaaatattcacataagggattcatttagaaatcctgtgaatttgtcttaagcaaaatgacagttattcttttgattaccagaagtagtctgcttggattattcttcccctctggcttttctggatgcagagatggtgcaatttcaacagttgggtgaaggacagaagttcacatgacagtgtgtgcatctgaaggtgactgaatgctgtttgaaatgagctggaggcaggaaagccatgcaatgcaggttcctttttctgaacaatgtctcaggagaggaaaatataaaggtgaaaataaatttgagaagataaatacggttccctgttaagtgcatcaattgttaaaatagagagaaaccagaaatcagaattgcttccttggaatataggtgcctactaccagcccatttttgacatcagaatgtcatgacatgaataaagagcagaagatccacaaatcctacaagacaggccactttcctcctagataaaaggcataacaacccgtaattcagaatttcaaaagtaattttttcagataagaaatttccatttcaaacaaaactttcctttttccttttctttcctcctttttcttcttcccttcttcttttcctttttttttaatatcttaatttttctttctgttaggggaaagtatcttaaatttatcctgcttactcttaatacacctcatagatatacattccaagtaaggtgaatcagatgtttaacgtgaaagctttgttcagcatagacatttcactgaatataaaccacatagcaaaatgcgaaactatcatactatgagagacgagttccactttaagcattatttatagaaaaaagtgcatattttaaagaaaaaatgatgattttaatcatcttaaaacattctaccactttagtagtcttttctgataaatttaatcaattaagataaaataagttgaaagggaaggttggagtatggtactttttttttgccttggtttgtgttacatggagtgactcaaaggaaacagaaaattactacaactgtgatgtggcatttataataagtgcctcaacctcatattgcccagacattaggagatttaactggtaatgccagtgagatgatgtagtatttcctgtactgttttaacttctcaataagcatgtagacactgcagtgaagtgcaggtaaaaagttcacagctggagggggtgtataggaagtgctctgcaaagctataagcttacataggcatccagctggaaataaccttgtaacagtggaggagggaaatacacatggtaatgatttacaatttacagaatgtggattttaggggctacaataagggtggcagagttttctctcaaagggattctgaaatatggagtggtggaaggaagggaaatgtagaatccagttaacaaagctgggagcactttaagagtatgcctgctaattttacctcttagacaggatatccaggaggcagcgccccttcccaccagcagctctccttatccaaagggtgcccagtccatttttaacatctgtttcaaatgtcacatcacagagatgtggtcactccctttttaaaaatttcacctagaattttgtacctaagaacattttttgttcctgagccttctttaactgtgaccccttcaacttctgccgccatgagattatattgtttcgatgacaagggactgtgtcttactcatctctattatactgaagccaaatatgattatgttgccaaccccccaacctaataacagctttttcaatggcttcccattgattttaggataaaacccaaaacaaactctttagtatggcttatactcatacaaagtcttttatgatttggtgcccgtctcagtccacccctctgtccacctctctggcactttggtgatttttctttcccagtacattcctgctgtctcacttcttggccttgcacgcattgctccttggcctgggacatgctgtacacctatctccacctctgttgctgactctgtcctcagggttcacaatcttctgtaggggccccttccttaacctcagagttatgcatctgcacactcttttatgcttctccctctcataacttgttctttgttttattactcactcagtattggttttcccagctagactgcaggttctgagaagttaggggctgtctctgcctttttagcactgtacccacagtgcctggggcatgtagcttgaatgcatggttctactatataagaactcaataaattttattttttgattaagtgaatgattaataaccaccatggactgagtagtaactatgtatcgatgagcatgttaaatactttatacacattatgttacaaaatcatcacagtagtcccattattacccataatatgtaatattactcctatttatagaaaagaggcaatcaaatcttagagaggttgctaattgcccaggatacctagctccaaatgagctgagggatgcttactccaaagcctatggctttttatggagctatattgtttctcaaataactacccaataaatgctcattaaaaacaaaacaaaacaaaaaagtgtaaaaacttgtgactatatcagcttcttccagtttgagaatctctctgttattgcatttgatttgcaaatttagtctaaatattcttttttgcctgttgatacgatgtctgcaggactagagttcaaccaagggcctcagttctgttcagatgctccctgtgtgattagaagtgagatgagttcatgtctgtaaaataagccaagaatggccaggacatcttttacctaagatttccaagcctcctgattggctggctgtaggatgttgttgtacagtgccttctaactctattttcctgaagatacatgattcagtgtaatgccaggttagtaccaaggctcctaagcacggcaatatttaccctacaaattacgaaaaatataaaattaggtcacagcacagcacctcaatataagaaaattcccaaccagcagggtgattcagtaatgaaccatctgtgttcctggatggatcatctgtgttcctgggcagatggatggaagcaaaagctaggtggccattggtcaagtccgctctagaaaataataagttcactggtcatgtctcctctagaaaatattcattagacaagaggacttctaatgttccctcagattctctaagaaggaacatttgataaaacatttatgtaagttattctgatagtttgtccgaatgtggaaaaatagttgtatatgtatatatgaagagcccaaactttggattcagatgttactaagttcaagtccttactctgaccttatagctatgcatctttggcaaatctttggggatctttccacctcagtattcttttctacgaataataaagttcactattatatttgtagagggcaatatattcagactgtggactataccaagtgcatgattttgtgtaagttaattaacccacatgcacttcagtgtgtcataaaatgtggagggtaacagtatcttcttcaaaatagcgtgtgagggtgaaaggaactaacaatgtaaagtgcttagaacagtgcctagcacaaaataaatcttcaattggttttaattattaatgttaacataatcttggaaacaactgattttttctcgcttttcatatagaagttttatattttataaacttgatcattgtcattttgcttgaactctaagtgtagaataaaagttagaagtttaaaagtgattagaattcatgccataaaccaagaagccaacatctcaacaaagtactgtgttcttaaaaaactagaaggaatgtttttgtgtcaaagtggacagaaaatagcttttccccagaacctaaagtatctgaacaaaattgatctttaagaaaacaatttgggaaatgttctgaatatatctgatagattttaaaatgcttaattacattttaaaaagcttcaagaaaagttgctatgaaaattgccctcgttttatcaaatatttattccaaagcaaatataaaaaaatagagagaagttcttgtaatatacccaggatagcaattgttagtttccatggcatatcagggcaaagtatgtgattttaaaaaaatatctcctgtgtcagtcctggtatacagcactctctccctttctctctctagtgcacatgcgtgcgtgcatgcacacacacacacacacacacacacacaggaaagaaaatagagcaaagaaccctggtttagctgttagcttcccaaagttatttggataacaacttagagaatctagcaagaagaatcatgattcattccataaatctctctagtattcataaaggatgatccaggtcttgtctgattctgggagttgccatttattgtgacctttttatatgccaggaactacagtaactgcttgtcataagtggtattacttaatccttataacaatcatgtgtggtgggtattattctcattttacagtgatggaacacagagaatttaggtaccttgatgacggtcacacagctaggaattgacaaagccaggatttgaaccagagcccatctgactacaaagctgaggctgtcagttgctgctctgtgctgccttgcactgggagaacatggcagagctggtgctgctgggatagggcaggctcccagcattccacctgctcttgtgctgggcccaggcgcaataggaaactggttaggttgggctttgatccacacattctcctgcatcgaatcccccttttctccccaatctcttctaaagaaagactgaaaactcgctccaagaaaagtgtcaatgactgctaatcacctaattacccctcttatggctctggagctcaacaagcagccacaccagtggtccttcaggaatcttttccacagggtgtaggaagaggtatcttgttttccttaagcccaaggctggcccttcctatcactgcctagtccttgctgatctaagcatcagtgctgaagggtcctgtcaccaatagtgccaatgagtctgtaaatagtgtcatcgtgttaaatgactcactggggctggcacacactgacattctgagggcacaaggcagagccccatctttgtccaggggaggacagaagctcctgaagcgggagaagatcaaggtctccatcctcaaaggaccctctgcccactgtggctcaatgtgtgtgggagaagggacacagaggatgaataaaattatataggtggactggacaacacacacttggccttgagctacctatatttagacacttactctatattgatgttgaatctaatgatgtttccttggataagagtttagacctaaagtgagaccagagtccattgaatcccataggaatgaattataataaagagtaggatgaaaagtcttttatttttcagcaaatattaattaaacatttattatgtgccagaaaccctttgaggtgctaggaatatgacagtgaacaaaactaggaaggctgcagctttcatggtgcttaacttctagtgaagacagacagatactaacaaaaacacaagtaaatagaacagaatgtccaaaggtgataaaggctatggagacaaataaacccaggtaaaaagaagagaggtgcagggggaaaggaaagagcaaagactctgagatgggcttgtacttggtgcattctgggaaggcaggagcggctggaggatagagaaatagagagagcggagggagctgtggtaggagcagtgggcagtgtgtgtgcacacgcatgcatgatgtggtaggcagatcttgtagggcctgtgaggactttgcctttcacacctagtgagatgggaaaccagtggagggttctgagtggggaggagacatcacagaacacatagccagagtcccttgtgacatatcacaaacaacacctaacatgccttcccaaaccaaaacactagccttgcccttcagaactgtttcttctgctggtagctaccatttgcatgcatttttctcaagccatagcatctccagaatcaatgttcatctgtccagtgtagcctgacactcttttaaaaacaactcttcaagacacggactgcctttcaaaatgccttcttccgccaacagagcacacatttagagaagtaacaaaggccatttctatccaagcaaacgtgtttcttgcagccaacagcatagccttataacagtaatgtttctatttcagagagtaaatctatcatctcagtaacaaccctttaaaacacaaagttatcacatgatcttcttactctatgcaggataagtcaagacccaacaaatgaaacacttctcctggaaattatatcccatttggttttttttttaaatcatcttttaaacctgtcattggtaaaccagatttagaacattagaactgctgcaaagatttgttatgagaaatctactgagggtctattgagttatttgaatatgatatttcacattaatatggacattaaaacagagacatgacaacgcatatccgtgactgcctctcttgctctaattttcatttcaaacccatattacttatacattcccaaagaacaacttcaaatattatattttgcaagcttgtgttttcaaattgctgatttaaaggtcttcttgacctttgtacagaattctaacatttttttcctgctttgttggcctgagggtggtgatagaatcaaacatgtttataaatagggccaaataaattgaaaattttttcctgagagagagagttttatgaagaaaatacctgcccaagttcgttttttaaaaatccctcacccactgacatttctggttcaacaagttttcttcttaatgtagttaaatgtcaacaaaagtgttactgcttaattatctgagtatcctgagtcataataatgcatatatcacttcacttaggaaatgtcttttctcaattaaattagctgttttcactagaatccttagtcagccaatggaaaaaataattttcccccttatgactttctctactacaataattgacctgggttcgttgtctttgatattacagaagaaagtctgacttttcaaatacagaggtaaagtaagtctatgaacctatgaacttcacttttggtacttcccctagaacagcagttctcagctctgatgcacagtagaatttcctgggggagcttacttcacacacacacacacacacacacacacacacacacacacagagggagggagggagagagagagagagaggcccaacctgaagagactctgacttaattggtcttgggtaagcctgggcattttttaaaagtacgtattttagcactttgggaggccaaggtgagcggatcatgaggtcaggagatcgagaccatcctggctaacacggtgaaaccccgtgtcaactaaaaatacaaaaaaaattagctgggcatggtggcaggcacctgtagtcccagctactcaggaggctgaggcaggagaatggcgtgaactcaggaggcagagcttgcagtgagctgagatggcgccattgcactccagcctgggcgacagagcaagactccttctcaaaaaaaaaaaaaaagaaggtatgtattttagcttgagaactatagataaaaaagaagcgataatttttccttccttcttccctcctttttttttttttttttttttttaaagagacagtcttcctcttccatctaggctggagtgtggtggtgtgatcatagctcactgcggtctcaaactcctgggtttatgtgatcctcctgtctcagcttcatgagtagctaggactacaggctacaggcatgtgccaccagcccagctagtttttaatttttttgtagagatggggtctcactatgctgtgcaggctggtctgtaacttctggcctcaggcaattttcccaccatggtctcccaaagtgttggcattacaagggtgagccactgagtctggcctattttcttcctttccctccctccctcccttcctcccttcctctctttcttttctctttctttgtctttatccttctttcttttcttctcctttttcttcctttgttttcacctatagtgactatttgaagcatttctattttttaattaagataaacaaaattggctgggcgaggtggctcacgcctgtaatcccaaaactttgggaagccgaggtgggcagatcatttcggcccagaagtttgagaccagcctgggcaacatggtaaaaccccatctctacaaaaaaagtacacaaaaattagccgggcgtggcacatgcctgtagtctctcagccactggagaggctgaggtgggaggatcactagagcccaggaggttgagacggcagtgagtcgccataatgccagtgcactccagcttgggtgagagaatgagtccctatctcaaaaataaatgaataaataataaaattcatataaataataatgtaactttagaagatctaattacaggcagggcgcagtggctcacacctgtaatcccagcactttgggaggccgaggcgggcggatcacaaggtcaagagatggagaccatcctggccaagatggtgaaaccccgtctctactaaaaatacaaaaattagctgggtgtggtggtgcgtgcctgtaatcccagctacttaggaggctgaggcaggaggaatcacttgaacctgagaggcggaggttgcagtgagccaagatcacgccactgtactccagcctggtgacagagtgagactctgtctcaaaaataaataaataaataaataaataaggaggccaaggcaggtggatcacgaggtcaggagatcgagaccatcctggctaacacagtgaaaccccgtctctactaaaaatacaaaaaattagccggcgtggtggcgggcgcctgtagtcccagctactcgggaggctgaggcaggagaatggcgtgaacccggaaggcagagcttgcagtgagctgagatggcgccactgcactccagcctgggcgacacagcgagactccgtttcaataaaaataaaaataataaataaataaataaggcataacaaaaacagggctgaaacatgccccttgttcaccacattgcaggtgaagagaaggagagaagagctgcagccccttagggagcccagacctgggagcttcccaagccagggctgggactccctctttggggtcctgcggtgcctgtcatctccaagcttctgggcaccactgtgttccctggtgctagccagggaagctgcttgcagtgcctctggtccagctgcagccttgcagagagctggtacctgtgtaggcacctggagctgcccaccccactggcgtgtctgcctgcacagttgccagaccccgtgctcgttcacacacccttttctgctccatgcgacttgcccttggcaagtgtgggatccaggtcggtagtgtgagctgagcacagcctgctgagtgggcggaacaagcccagtgggccgaacaaaactcaggcaaaagtgccactggccagaggtttcaggcctgaaaggccacacctcaaggatcctgtaacacaactatgggatgcacacagctatgtgttcagtgcaggcagcaaataaatctcattttaatctcatgggtactaactacaaaaggtctttgactttttcctattgtgtatctctgtcttcactggttaatttgttgttacttcagcatctcttgtgtagctgagatttgaatacacctgccaggtggaaatagatgagccttccctctagatatttacatgaaagctaaggggccttctgagtggagaaggtgggtagaggcttaagctgtattcctaatttattttcagttatttaggcatatatgcagaatgggacaagagtcaaaaggaaaccaagttttcaggagggactggagcttcccgaggaaataaaactatgaagaactgtagagtctggtataaacagggtgcttcagctataagaccacagagtcaaagggcagtgattttgccagcatggcactggcacctggaaccgtcctgaaccagccatcctggctgtatgtgacctagcaaaggaaagagctgtgtggaaaatgaaagagatgtcacactaaacttggaattattttgaaatccacagcccatggagacgtgtagctccaggcagtattggccagtcggcccacagtgtagcctggagtggcagctgctagtattcagcagttgctcctatttaggagagcttgtcaaactcttgttttggactcccaaatacctggggtatagttgagggttaggagtaactttgaacaggattggaattctcaaatgagaaggtgcagtagaaaggttgtaacctgtgagaatctggtcttgatgttctgtaacctcatggactggtagactgaaaagactcatggatatttaggtgcactggaatttatttttaaattctccagtcaccaaatctcatctccatctttattactccaaaggccttcttttctttttcctccccagtccatcctgcatatacctaacatagagggatacattaaaacaggtcaacacaacatattgccactggccattttgaagattggctgtctttgtagaaaaatcaccccttaaggcagacttctctaattgcactgctggattgttagagatgagtccgtcttcagttatcttgattgttgagccaaatataccataaatcctcaaaatgtatattgtattttttttaaagttaggtggggcgtaagattttacaggatgtagaaatgtacttaattagttcagccttgaaataattattctttaaaaaactgaaaatttcaagtagctatagaatatctctaattcctctctggctaccattatttccaacatgcagtgttcttacatagcccacttgccaaaaaaaaagctcttgttataaggttaaggccacatttctgtgtagttaaaactttgcttcagggtatgtcctgactgcatataggttaatggagcactgcatgtttcttatacaatattacctgcatacttgctaatactcgaattctagagattcactgggggatacaaatggatccagcattgatcttgaaatcagaagttcacagttctaatcaggtttctgagtagtgaatgaacttagagagaagctattaaatttctcttacatatataaaaagggaataatgattttactagaaacgtctctaagattcacaccacctctgatattctgaacctaaatttgagtatttacatagtttacataaagtaagctcttttgcatcaacggacagggtggcatgcaggtaaggaagaaaaggaagaagacggagtcccctcaacttgaaagagctcgctgtcaaggagaaggccacttactgaaagacctacctcattttaaggacggattgattacaaagtgaaccctggatgggaccagagatccaacctcatgccaaaaggactgtgtgtctaaagcaatgacgccaaagccggcctcttaccctgctctgccaaaggaaacaagaaggcaaatccgcaagtctcccaacatgataaactccatttgtcacccgcttacatgtgcctccaagactaaacttgtctcatggtggctccatttcagttaagtacttttagacctcagtccaaaccccttctcttaggatttggctcaaactattgataatcataaatttccatatttatatttccaatctgtgaggacttaaaaaaactattatggaaaccaagtacaatcttagggaacagactgtgtatttaatttacacaatgaaacttgggctgtagcattaatactgtaacaatactgaataatttaactgaagtgtattacattctttgtgctgtaaatcttttacttgtgagttttgtgcaaaatcaccaatttagccttgcataaaagcttttgtttggcatttacagtctcctgtcccttggacacctcctccatttaaaaaaattagaattccttgttgcagattcatttcttttcttttctttttttttttttttttttgagacagtctcgctgtgttgcccaggctggagtgcagtggtgctatctcagctcactgcaagctccacctctcggattcacaccattctcctgcctcagcctcccaagtagctgggactacaggcgcccgccaccatgcctggctaattttttgtatatttagtagagacggggtttcactgtgttagccaggatggtctcgatctcttgacctcatgatccacctgcctctgcctcccaaagtgctgggattacaggtgtgagccaattaaaggagtcatggcagctgaagacaatgacgatttaatggagtgaagccgatctactatcttgggtggaaagagtatgatgtggttggcagtgccttccacattccagttagccgagtgctgtaaaatattaacaccaacactgtaataaagtagaaggtgatacggctctggttggctatttatttacttatttggtaagttccagtattgtgcttagaatgtacaggtaaaaggatctgtgtagattgtgcaggctaatggtgttctgtggacgtgtgttcatttctgaataagtttttgtttgctaaaggaactgaaaaaaataagattcatgcaagggatttaccaaaccgttaaatttattcacttttcaaggaccatcgcttactctgaggttatgttcgtctcaatgctttcaggctaaaaaatattttttttcatgaaagatggtaatagtaggcagtagttttgatttttaatgtacttacacagaaaaatgaaatatagcaaatccatgtccgcttccatactataagatgtaaaagtctgaggaccactcaactgactatccatttcattgtatttttagggaaactgaggcagagtggctaactgcttgcatgcagtcacccagctagtcagttccactgatgccgtgtggctttcgataagctcagattctcaaaatacagcaggtgtgtgaaggacagtatatgctgtacctaacaagttcaaagagttacccagaaactattgtcatgttgttttctgtttatcaaactcttatttgcagtctttttggtcacatgagagtttcatcagatatctgcaagatgtaatttctctcccaaaaccccaaggaaatgctatcaaaagattcatgtcttcaatagattctattcttggagaggttaatatggaggaaagatccatggtcagtccacattttgtgcagatgacgatggcggcgcaaagccacctgaagtcattcacctttgcaactgcatttggattctatattgtctgcatcaggcatggagacgcccaccggctgctgtgagaggaataaaaggagtactgacaaacgtcatcatacaaaaaaggtttcaaatcatttttgacaccagaataaaagttagattcctgtgtctgtctgagatttcgagttatctttctaaatggctctctaatcgcatcagcaaaccctcagggaagagccttcacttcctttctgttgtctgttaagccaagcacacccagagtggtcaataaataatactgtgggagtactggagggcagggagtggtgttgcatattttgcttttgatttttcctctggaaaaaaagatgaattaagtgacagagtggcaaaaggagtaggcaacaaagaaacatagccggaaacttgagcgtgactcttaatttcactctttttagagctttaatgcaaatccaattatgtatttgctttcagttctgaaggtgagaaattcgaggttagacatcacaaagctaatacatagattccctagagaggatattgataatatttcatgttttcctcctgacataatattcccccaagtgaaatccattgcctattattattgatactgtgctatcctggtagcaaacttgaaatgtaaggaaataggattctgttcattatttcttaccagtaaaattaatgaatcagagaagaagctaatgtaggtctgttttatcactaaggtgctcagaagttcaaccttccttttgttctcctttagagaagctgtacttacaagcattgcaaagtctgacaaattgtatggtgtctattattatctgtctgtctccttcccagacagggcagggattctatcttctctattttcataccctccaagacctaacacaagccaataatattccatcaaccatcgaacacatatttaagtgcctacagagtgctagggagtgtgctgggtgctggggactgaaagagggaagacagataattctggaaggtataatgtaaaagaagagaagagctgagctaggggaagtcgggtgggggtggatttgtctgagtggcttcccaaaggaagtgatgtttaaggggaaacctgactgatgaataggagtttccccaagttctctttttctttgtcttttcaggttactggaaaagctagtgaggtttgtggctggtatcatactgtttaatgtgtcatctgctaccatggtcaatgtgactcttactaatcggcattcagatagcgccttgcatattgattgtatgctaatacatttgagccagttggccttgctatgtgacattctcatgcttccccaaacgtgaacactgaagtgaaccttgggtggccctgctttgtggatcacatatctcccacatctctactttcagaataaatttgttaatacattctcctctctcctgcaaggcctagatagaagaaactcttaatttaaaatattacaacagaaagttattctgccttttgccaagaggtgtgatcctcatagtcgtttgaaatatcatcaagctgagtctcacagatgctcaggggtgaaagaaatatgtgtaaaacctggaggtatgaatggtgtgcatcatgtattgtatgcatgagcagaaacaccagccttggagagaaacaccagctttggagagacacaccaaccttggagagacacaccagctcccctcttactctgtttactgttttctttctgtgaaatttaaaattgattccatgtgtactataatgcaagcaatggggcaaggctgctctcttttgtctctctctctctctcacacacacacacacacacacacacacacacacacacacacagcccttcagagctgcctgcttaacttctcacagcaacttcctccactcggatgggctgtggtccctgagggaagcctcggcatctgaatttggcagggaatcccattcccatggaagtcagggctgccctcactcccaaggaacagcctggggaggttctcacacatttgcctctggcttcactacagaatatgtacactcaaaggggacaatagaggggtctcccacaccccacaactcatgcagacccacagacagttgggaacgtcttgctctgaatatgaggaaaatgagatctatgtgaatcttcaccaggccacagctcatacttcttgctgctgtctataaatgaatgttagcagcactttacatatcaaaattgtccaagtgggacctgacctttgggcctttggatccatgttgcattcatagccatttagatctgaccccatttcaagtgttcagaaaaatgagaaacaattttacaatagcaaaattgggccctccaacccttccccacaaaattgaatgaaatacaaggaggaaaaacaaatggagatatttgtgagaatgactgacttccttctgcaaacagaaatgggcaagttatcagagttaaaattgccttataaagtatctttatacagcagaagagatcatcagaaatgcattttttggctcaaatttccttttatttctcccttgggatctctctttctgactttttaccccaactctctctctcttttttttttttttttttttaaagacagtctcgctctgtcacccaggctggagtgcagtggtgcgatctaggctcactgcaacctctgccttctgggttcaagtgattttcctgccccagcctcccaagcagttgggactacaggcatacgccaccatgcccagctaatttttgtatttttggtagagacagggtttcactatgttggccaggctggtcttgaactcctgacctcaagtcatccacccgcctcagcctcccaaagtactgggattacaggcatgagccaccgcaactggcctaccccatcttttttactctctttctggctttgccaatgtaggcagtttcaatttcattatatatgtgggtcgaaactttattttaggaataatcttggatgtaagactactactgctttttcagaagcaaaccattttgtggactgtactcagaaatgcaaaacacagcctcatccactgagtcctgcctcccaggtctgatgtggagtccacagtacaggatggggaagactctgggtgtggctgcagcggtggtgggccctgccttgcctggtgctctttttataggctatagaaatacaactgatgactcaaaactattatatcttgataaatgaaataaacaaaattcagtccctaacactggtgtggatgggcatttgggcagtacctacactgtaaatgtccatgctataaagaacccctgggaatgaagagctctgtgctccctcccaggtgttcttctggccagtctccttttctgtcttcccctggtctgaaggattgttcctctcttctatgagagtgcagctgaaaatgctcatagtctctccatttcgaacctggagccaggctgaggtggatgccccttctctgtggtttccatagcaaagtgctctgtgcacatctgggacttacatttctctcttgtcctgcaattttccatttcactaaatagattgtatttctcattccaccaccatgcctggctcaatcagtgtacactgaacacatctcttctttttaaaagaatgtaatattctagaaatcatggatagtacactgtgttatcatggatagtacactgtgttatcatggatagttcaatcatagatagttcaatgtcatataagtcaaacagactttggataggctagcaggaggacttaatgcactttctttaaattgttcctacaggaaaatctgtaccagaaatgccaaacaactgaattcaaaatgaatttctggaactcaacactcaaaatcagagacggttcagagagcaggtatctactgctaatttctaactaaatgaaagggcttctgcttctgagagcaatgataccggaacaggaacgaaatgctgctagagaacagtgctggaagtgtgtcgacaaaactgtcttcttgttctagtctatgcaacttcccttgattaatgagagccatgtctaggtgagaaaagcaatcagagggcttcagctgtgccagcataaatggaatacatcaatggtactgttggtgcttgcacatgagacctgtcagtaaattatccactaaaaagtaatgattctaccttctttcattcattttaaatcctatcctatgtctctactctttgtgcttactattctgctttgtttccaacaaggatatcaattcaaattttaaggtgtggagcttggagtagtctgctggtacagcaagcagtaagaagtgtgcttcattccttctacgtagtgaattttccacctgtaattctgaaagtcctttaggcaggagctaaatgtgataaatgtcagcaaatgaactgattggcataaaaaccaaaattcaccagagagaagggcaaaaccaccaacatattttcagttgtaaccagatcagactctaattgcctaatacctaataaataggggaataaaaatctgaaatctcctttagaaataactattttagaatttcatggaaaatctaataataaaacttgatgtacttgggactatgaaaataatttaagtctttaaccagacttaaattatatacatacacatgtatattacacacacatgtgaaaagggagaaaataggcccagaaaaataacaattatctgacattggattaaacacatgattgagcaaattccttgagggcaaggattgtgtatttaagctttttggctgagagatgcggtgtgtggagaatggcaagaatcagataaacatggatctggattccagttctgccacctgcttaaccttaagcaaattactaagccactccactctcaacctcttcatctgcaaagaggagaaaattatttctatttcctagaaatgtcatggagaaagcacttggcatatagtaggtgctcaacaaatgaggcttacctccttatcccttctttgcatactctgtggcaccaaagacacctaggaagcttctaacactttccccttcacacgcccttggtcaggaagcgaccatcagatgaaatgcaacaaaatgagagagtaaacaaacaaatagagagacaaaagggatccagaaacagggaacctgatcaaggaaaggagtgaagagactctaaatatggtggcaggaagtcgtaggacgacagctgtatcagcaggcctagggaacacccattaaggctgtggctgggcacagagggctgctgtggagatgagatgtatcagtgtggaaaacatattgagaaatgtttcacagagctgttagatggtatgagatgacagccagagatgtaaggaaacttcacaaatgaaagaaaagttaggtatatgacccctggataagaattataattacagtgtactgcttatctcagcagtaaatactatttatcccttcataaattctgaaaacacttatctaaattttttatctgactatattgtggctaaagggaagaggaagaaagggttgaaaatagaactaaaatcttcatctactataataagatgtaatggatacggcctaaagttaataaatcaagaggtatcaggtatggatgcatttaggcacataatggtaaataccaggagaagcaactaaaaatgatgaaagtggtttcctcctgagactgaaaagagtgagggaaaaggggccagggaatagcttttgcattttaatatgatttgtcttttcaaactatatttacgtgttactttgataaaggtaagactcaaatttaaacatgaagacagtaattgcattttggaatcataaaattcaaaataatagaataaaattgtaacaaaggcagtgagcaaggcctgatgagtcaaggtaaaatccttagcagcaagtttgggtccagacttcttgtgttacgtctctcattcccatgctcttcctaccacacagcataccccagttattacatttctcatgcagttggcatggtttgccacatataggcaatgattaagtatttgccgaatgataaataactacaccaattgctgaattgttttttcttcatggtgattttgaatgagtttcgtctgggaagtgcaggcgtcatacctggagttcatagttttgttctatctgaaggagtaagattatcacatattgaaaggtttcagaaagctggccctgaaacctgaacctgattctgaggtagacactcctcaggtctaatccattttacataatgcatgggtttgccagagactcgtttgagaaaactgttatttgagtgaggcaatataatgggcattttaattatgcattcctataaggtctgtatgccctcttcatgggttaagctacaacactggtttgcaaactaagtcctgaaggaacttaaagttctgggaggtgccttaggaaaatcctgaaaaggcagggggtgagggagtggggaggaggataagggatgaaagacgtgttcttgctaaaagaaagtgtgaaaactattgaaatacatcttccgaaaacattatacctataaccacattatctcagcttcctggaggaaagcctttactgaattaaagtataatactgaattaaagcataatattcattatgaatatgaatatttataatattcatataagattttataatgcagcttaaaaacagaaacatcaaagtcaacagtgtcatggtgtctttccaaaattcccagtggaagatgtccatcaagttacctaattcccctgatgataaatgtacctttgaatttatttccaggaaaaatttgcctccatttaatgaatgtgtatggttttcatatatttaaaaaaaaaacttctgtattcccacattcttccttttgaccttagttgcttggaaactcagagttaaatgagggctcagttttgaaaatcacccattgcaagtttctactaatatttaatttgtattattttatcggagggtgcttatttgcaatgagaagcaaactaacgtttgtcaattgccttcaaggcgcaggccctgtgttcgttgtatatctcatgggttatttcatgcaccatggaaaattttcaacaatcctgaaaaacaggtattgtcattgtcattttacagatgacacagcttagtttcagggaatttaagtaagttggccagagtcacatggacatgaagatatttgcaacagttttgaagtaatatataaattctcaataatgtatattttatattaaaattcatataaaattattcaaacccatttcattttcgttgatttcaagattatacagcctacatatacacacacccccatcgcataacttcttttctttctttcctttgtcctgcctttttttctttgcctgtatattgacactttctctcaggcactgtgtttgcccttggtggtacaaagatcaattacatacagacatggtttccaggagcttgaagtctagtagatgggttaaggtatggacttaactacaattcaaggtagaaagcaatgaatgtaatgagagatgcaaaatgctttgtgagttcagagaggggaaaaagcaatgtcatggtcccagccctccaggagttcacagttcggtggaccagagacctaaacgaaattataatacagtatggtaagaactatactgaaaggtttgcactgtgctgtgggtactagagggagaagaaactaactttgtttcatgaaaaggagtgattatagcaacatggacactcagggaaggggatggagagagtgaagggctggggttccaagataccagcagaactgcctaacaaagtggacaggatgttacagccagtagggatcagacagtggtagggcaaaaggcattcatagggaggagagctgacgctgtgaggtcgagccccaggaaatgattgtatctggggtaaagctgcaattccaggaaggaggtctggcaaaagcaatagagataactagaacgccagttactggcctcatccctaaggagtatggagcaaggcagaattgcttagacacgctgtccaactaccatctggagggacaaggtagctggaaagaaggaggtaaaaaggagaattacagtatcaaagcacgaaggcagcagcagtggaggcagagacgtggatggtcatgcagtggtgtcggcagtagcacctgggaagggagagaggaagtatgctgactgcaacggttctaagcctggttcaaaacggggctcaaaggggtacaagagttaatgaaagtcatttttgaagaatgctggggtttgaacatgattgaagatagaaaggagagagtaaagatgtaagatacaatgattgatggaatacatctcctggagcaagagctgaagttcaatgttggcctctgagaagtggcacgtggggtgcaagggagaaaatgagacagaggatgggtgaattcttgacattctgatgtcggtaggagctgcccccctccagtgtgttctttatcctgctactagagtgacttttctacaaagcaattttgattcactgacattcaatgcatttgaattaagtgattaccttttgccaggtacaagttatatttctgcttataaactacctgtgcagtttttttcatgactttccattgccttcaggatgagagaaaaaaagtcacttggagtatcctcagtgaaactctcttactttacttttatccgtatgatttccccagcatataggccagtccagcccccatcaatagggcctcttcagaatcacatctcatagatttgatccatggggcagctgagagggaattctctgctttccagctctgactagaactggaaggactaggactcaaactaagactaggtccatgggcaaatgttgtttagagagcagacttggtatggaggaaggtggaagtgctagctcctgttcctaacttctgttgggggaggggatgggctcttaaagccccagaacagaagaaaggacgataagtcaatggtataatttatttgtccacatgttcaacaactaagttttgggtccctgcaacatagtagatgtgttaggggttggaatacagtggtgaataagacagatgccacccctgtattcaactagcttgcagtgtagttgggggagattcacaagaacaaagatatatgagaggtaatccatgctcaaagagaagaagcagagggagctaccagaccatataggatgggagctaatccatattaggagaccagggaaaccttctgggggaaatgaagtcttagctgagactgaagaaaatttaggattaggttagccaagctgagtagatcagaagtgttccaggcagaaggaacagcgtatttgaagacctgggggtgagagaaagcatgacacttctcaggaactggaggacatttattatgaaggttgctaagtgtagagtgtatatgagtttggggagaggatgggtgaatgggtaggagtcaagggaagagaaaggctgggaatgaaaaccaatgactttggagacttcggcaggattcagatcatacagggctttataagctgcctatggagttggactttctcctgagaaaatgaaggccatttaaaggttttatgcaggtgatgacatgatcaaattcctattttagaatgctcactctggtttcatgttggcaagactggaaggaggcaggccagttagcaagcatgagaggcaagcaggaacaatggtcagaagctgttctggatatgttttatccaagggcatgtccatccagagactgggggatgtggagatgggctggccagcttattagcctcatgcctcttcccagcatgggaacatcccttcaccactgttgccaataataactccagcggctacatgtccccacccttccacctttcaaggcctgcgatgaaacagtcttaagtcagtcagggcaaagaggctggttcaaaattggtctgcagggaaagggtcaaagaagagagagtacagccaaggggagaaagaactggacaaagactcagagtcacacagtagagacgtgagccaaagaccagaaagtgcgatacacacactcctgtgctcacccacacagacctgtggactaccaagcaggacccagtaagctccctgtttatgaaattcatgtttcataaaggtggagctgaacttaagagcccgtgaaaagcaaactgtggaaaatgctagtggttaagggtggagagaactcacagtagaatgaaggggaaacaggtcaaccacccctgttctttcatcatcgaggatcttgaaaacttgatttagcaggatgcacagggaagcagtcattggcttccctctattatgttcaacttaatttattgcttggagaattaggcaccactttattgttcagattcattgcatcaaatgcaaacattcagccagagttctctaattagtatccagagagctgcctaggctatgcgtatgtgtgtgtgtgtgtgtttaagtttggtttctcctgcttgagacacaatgtaaaagggttaagatgattcactgacattacacttctctgatcctactagtctaaacatttgtacggtcttctgtttgaaacccagaactccttatagtaaacaccttctgaatctcaagtctttgtgcctaactttaattaaccattaatgtgcaaatttactgattagtgaactggctaaatgggtttttgcctcctttggatttcacaaaaagaaccaccacccccttctaccaaactgataacaactgacatctgattagaaaaggcaaaactaattagaatgagtgcaaaggggattgtttgagtcacctacattaatgcacattacagttaaatatctgtcagattttccattaaccctcttgcatttccatctccaggttcaaatctatttcttaaccctacaccccttctttccctagttggaaacttggtattcaacaggctaacttacccactaatgctttaaatgcacagctcttattgatggatgtgacacacagacaaagaccttggaatgagaataatagaagccattcccctaactgtggagttgaaccgtatgtattatgatcccaaggctaacatgttcttcttgttattgtgttcatttctttatggagggaaagaggagttaattgttgccttacacaaattcactccattgtgctctgagctattacatactaggataacaaaataaaatagaaaataaagtagaatatccagcaaagagagttctattctgtgaaaggttaaaaaacatgtttaaaatgaaatttgttgacttaggggaaatgcccacatgatttttgctcacttcttatatagaatggattgttaaggattgagaaaacgtaatgtaattactcaatgggaattcacaaagtaataaggacagatacctccttcagatcaaaagctcagccagggaaggaaccatgttttcctgatctttgagattatatgagtatgaagggggtcatttaatcttttaatccccagttcctggcacattgtaggtgctcaatacattttcatcatatgaacgaatgaaggcaagaattatggtttcatcccattgtgaaactctaacagtaatcctgaaaagattcttaaatttgaatggatgatgttaaagagaaagagaatgaatgaattttctttattatgtaaaatacctaacaaaactccagaaatgtttgctttaaaaattaaactgcattctcacttccttgtgttttttttttcccattttaatctgggaacagaggtaccaagaagcccagcagcaaatcagcctagcaatagaaacaagaatatgcctgcaatatgatgaaaatagctcaatttgaaaacaatctgattgtttaattttttaaaaactctgaaaattttacacttccattactgcaccacaatttcttatttgatctcaggtgtagcatcagtaatccagaactgtgcttggcaaatagcaggcacacaataaatatgtttttaaacaagtgaatagaagcttagctagagctaagaatggagcaatattcagtaagctcatggctcctggtaggcatatcaggaaactgagagatctgtggattcagataaggcaaggtcagtgtgaatttgactaaagatccctccctacattcgaattgacctaaatttttcccgaggtggtgattttgcctgggactgtagaaaacagtgaaatttcaaacatatatcataaagaaggccctgacagcacaacccaaaccacctctacctatttccttaatttaggcagcatagtaattatgagccctgactgtaaaatcaggccaattactaaccataaccctgagcaagtgatttgatctttctgagcatcagtgtcctcacctgtgaaaaacggttgattatagctaccatttgagttattcgtatatggcacaaagttagtgctaatgttaaaaccaaccaaccaacagaataacgacagaagaacaaaaaagacaccaagttcctcctgctaattttccaattatgattcttcaatactaattatatcaacatatgtatctggaaattcactctacattctagtcaagcactagtttcacggagtattaaagacaaatttttctttcctttgtaacttaaaagataaatggtgaaatatcaaaaataaaatgaaaatgtaaacataatgctcctggcctcccacagacaacccacagtatgtctgtatcaaccttgttcccttttgccaagagtcagccaaggtgagttataaagaaatcatcaaatggtgaagagtcacttgcagtgatcacctaccatctctcgagtctctatcccatcttcactatagatttcatgtcattatatttacccttgaccgcaggtatgtcaccatttttttagcctccttctttgttctgaatatactgacaaattttgtttctcagcttttttaggactttggcttggttttactttggccctccaggctcctgacttcctctaacctattctagcctatgaacccaaactctggcaccagcctaattgggttacccttcaggcaacctctaggatccagcaaaggagtggcttggatatcatactattgcaaaacaccaaattcatgattattttcccattggaaaaggcgtttccagctgatacaagatttctatttcttctctggccctttcattggacaattataaggatttagaggtattgtcagcatatgaaagttacattgatttccccactgccacccaggccaatttggaaacaattttctgtgtgttcatccttaagattagatatatacaatactaccttaaagaagtggggcagagaacattaggagatgtgcctgatttacaccaagggttgatatggtgtagagaaggataaacttggctaggaagagagagtagggtgaggttattaatatatgattgaggaacttggctttaaactaaggaggcaatgtacaaatttatgtttcagtcataacaaaccatccattcactggctgccttccctccaagaagttttagatatgggagaattctaagccaaatatagaatccacttgagttgcatggatccaatgttagaaaaaaattcacacttttaagtgactgattatatagctctgaaaaagatcactttttggttcaagaggtaagcacttttggcttaaaccctcatgagccctgatcagccaataactctttcacaacttaagtaagtgctcactgacttgaagataaatcagaaatgcattcattgcatccccgtcttgccctatcccataatcctcaaatcaggaagggaagaaaattatagccaagaggtatctccatgtgccaagctacaaatattagcaagacaagagtctgctatagacattttgtaaaacaccaaatagcatttgttttccccatctctggagaagaggttacttaaaaccaccccaaacatggagcaataaggatttattaaacaattttattatgctgcatccatctctcaggcatcatttacctgtaggaaaatagaggtaggtacacagtaaaagagaaggggcacaggaattgcccacattcagtctctagctgcaaatatggatctgtctgggttcagagttccgacaggtaaagggaaggtcaccttgcatatctatgaggtgaactgcaagcaactgatcaacaaatttagtctaccaatttgtagcagagaaccaagattttcatcaggctaaagagcttcaagtaacaaatcccacagtaaatcgtcctgtttgacacaaagtgagtatgacaagcagaaaaaaaaaatacatgactagtgttttcctttaagatgtttcagttgataaatttaagagttgcttaactccaaatcccccaccctacccatgactttggtcatcggtaacagagatttagctgttctggaatgagaacagacatttgtactgtctattatagatggaagagttaaaactactctgagttgagaatacatgccaacacactggatgagacaacgagaatcagaagaaccttagaagtatgtatatcaaatacaagttgcttcccaaaattaacatcttgagaaggagctcactttctttaactgccttcagagaaagctcacacaccacacttgcaatgcagccttgtcacatcatagttaccccttggttttgacccaaagcagcattacctgacttgactgtttgcaaaaattgccctgataggatgaatgttactgtgttggtaataatctaccaaatgtgctataagccctagagacaatccccagagaaaattctatagctgtattgaacaatagcatcattatcagaatgtgtatacttccctcctaaatgtgaatgctttccaaagggcaatacttacttgactacacagctgaagtatacttgcttaaaactcagccacatgattttgggatcatatgttatagaattattgatctggaagggacaatgtggttcagtctataaagctgggataaagctttaaatgggtggctactccctgtatcgaagagaggcccttaacttgaaatactgccacatttccaccactttttaagggccttttggaagagatgaaaattacctctgtatcatatatgtcatatgccctaggagaatgtaaaaaattatctaaggcattggaacatgtttgttgatttggccgtcagcaccagagctattgaacctctctgtgcctcaattctcttactcgtaacatggaaataatggcatttccctcatacggatgaaatgagatgccacaagtaagggaggcagaagtcatgccggttataaatgctaactcattgctatctcattatttataatttccatttttatggtcagaagtctgggcctagaaagggtaaactgcaatacactcaagctgctggatagtgaaaaattagagataattctcttttatttatttccccgatactggttatgttagaacttgggatttactccaatgcctctcctataaaatagcagtgcttttttaaaaataacattttggtgatttatggctctttccataatcattatagtaatcaacttattctagactctggactgagaattacctcattttattttcaatacactcctaggagattttcttttcactcctattgataggtgaggaaataggcttagagaagttcagtgagtcccttgaggtgacacagctaagactgtcagagtaagaatttgaacctacattcatccaaatcaaagtgcctgcatatagcattagaaaatagttctacgacttgtttttaaatgctcccaaaattccctgggttaaaaaaggaattttgtaaaaaaacatatgtgtgtatatatatgtctgtactccaagtccattctccaaaatctataattttttaaaaacacacttcttaagtagaaaagggctgaaagctgtgcttagtgcataacttttgaatcctctttgagtctggtgttctcttggccaacaactagggcaaaggttagcttggacagagtttgtggtgtttgtggcattcttttctgggcaatagccacgaaaactactctaggaatgttattggaattaggatctgcaccatcgcactgtcctgagataattttttgacatataatgtgctatctttgtgcttagatagataacgcagacctgtcaaattacacgcacaaagctatattcaaagttccttccttccttccagaaagagttttttcttttaggttccctggggatcaggacttactcatcaatatgtgctctggaggcacagagctatgccttcatattgttcacgtttggggcggaataaacctctgttttatgttaaccaaacgatgtaaggttaccagagattttttttatctgtagtcgtgataatttcatcttttaacatttaactcagactttggttttccagaagccttccctgatttccctttgccgggtaagatacccaaactctgtgctctcatacctagcattgaaatggtagtttaaaaatcccgtctccctttccttactgtgcttgcagacagggatcatgttttatttcaggctgatattcggtccacatgcatcacagggagtcatcgcaggatcattatgatcattgggcatttaaatattccagttggttggtgcaggtgtagatcagtcatttaatactcaatcccacctccagctttattcaatactcagcataataacaacatcttgcacatggtaggtactcagcaagtgcacattgacttaatgactaatttactgcttggataagtgaccatctgattgacaactggatatgtcactaacagcatacattataatgctctattctgagtaagcaagaacctttgatcattacagatcacaatgatactaatgctctacagggaagtactagtccttgcctctagatgccctcaacgaaccaggctttatgaggtcttcatatgactccatcaagaccactactgtctttggtcttgatcttgtcccaatacaaacataatggtaaccacagcataaagatcaagctaaatggtctctgggaactctgtatttggagtagtagagcccttacctgtctctgttgttgggagacttggtatcccattcctgcaatgggctgattctgcatttgctgaagtaggagcttttgctgaagtggcaaaggtgaccttagcaaaggctggcttggtagagattgggcaggctgagaagatggttgttgctgctgctgctgctgctgttgttgctgttgttgttgctgctgctgctgctgttgttgctgctgctgctgctgttgggctgaaattgagctctgctgctgttgctgttgttgagctgaaattgaactctgctgttgctgttgctgttgctgttgctgctgctgctgctgttgctgctgctgctgctgctgctgctgctgctgctgctgctgttgctgctgttgctgttgggtgtagtgtaggagagaaggcttgttctgggaaggcaaaacagaaggcatctgctggttcgcttgatctgagttaaaatgaaacaaaggcttggtgttgccctgacggggctccatggctgggtgcgggttgttaataaaacttcgactgagatcctgaggcttttgctgcatgaggacatctaggtgcccaccctgggctgaggggccggccttgtacatgtagttagccattactttcgactggccgctgccgccagctaccccaggcatgggggagctctgtgggctgaatgtctgctgaccaaaagaagggctggggattttctcctgcccaaatggacctggtgatggtccagcagaagagggcaaggctgaccagttggtaggctggtgctgctgctggtgctgctgcatccgggcatgctgctgacgattagcagctatctgtttgagctgctgggcatgggatacttcctgccagcttggcaaggcccggcttgctccggagcctgtctgaggctgagcctggctctgagggactgaagggattggagacgaagtggagagggcagagttggccatggagaatgcggggccagctgatgggggcctcagctgaggagagcctgaggggccctgagtcaagcccggtgagtattcacttttgatcactattttctccatgggtaaggagggcctaggtgtgctcctctggctttgctgacccaagtcaatgttaaatgggtcatcctgctttatggtggcattgatcatgttctccagttcaaggtcactcatgggaggcacagatatgttggtcagttcattgaacagttcctgcagctcaggatccatcagttgttctccagggtcgtctccgtacctattaggaaaaatattctcttgggtcatttggccatccatgtgcttactgcaagacagagtctctcctggctccttctttacctcctttaagcccatgttaaacaggccattgccaggagaatgtgtatgggatggcagagtgttagtctttcgcaggggtgcttggctcataggcaaggtccctgacataatctgactttgtccattgtttatttggaggccaccttgtcctgcagagagattctccccaacacgaattcttttgatatcaagaaatgagttgtccacaaagccattgggtcgcttgctgttggcaggagataggttaactacctgttttcttttcaaggaaccctggagctgaaagacagaagggaataaaaaggaaaaataagaaatatgaatccaatgatgcttctcataaaaagtgatgtgatatttaaatgtttcttctatttacacacaagattcagttttttaaaaaaatggcacagagagagcacaaatgaagcacaatctggattataataaaactctcagtagcacaaacacaacaaaataaaatatttctggaggagcagatcaattaggttagagatcagtggttcccatgagtggttcataggtcaatggatacagattccttcaaatatcataagaagttattcacagtacctaagattaaagcattgttattttctggagcaagccaaaatattccacatgcatgcacacacaactcctcgcagctacagatgatcagagtgtgcacaattttaagcaagatagaaaacactcacaagtctaaagctgggaacaaatctctagtttcttttttttttcacagacccaaccccttcatcactattatcctctaagtaagtaattagaatagttctcaggcctaaggagatatgctattattgttcatctacttttcttcctataattccactgctttgcatccaagcctatgtagcaaccttatgtggacacacaaaagtcatgagatgatcattcctcatatgagatactttaagcactgattttcctgggaattcatttcttctgtttcctgtaactaaatctcgttaccaaaacgaaagtgttaattgcttaggctctggaagcagacaaaactgagctcaagtgccaattctgtcactgggtgctatgtgacctcagcaacttacctgagcctcaattttctcatctagaaaatggggacaatagcacttaactcacaggaagggatgagataatgcatataaaagtttagaaagtgcctgttacagtaacaactcaataaacaacaatttgtagaaaaagtatggcttactacatgctgaaaggggagcttgtctaaacagcaacatgtttaagtttttttgtgactgttaaagtacttcattcacaaactagcaatcagattatactttatgagccttaaaatttacagagaaagtcttaagggccatataagcacactaatacattaaaaaagaaacataaagcattcatcattcgtcctcatatccttgttgatttgtctctgaagtgagagaccatatctaccaaagtgtggctttcccagtgctgcagacccactgaaattattcaatgttttctcagcataactgtaaaatacacgaggcaagaaaacatttcctagatagaaaattctatcacttctcctatcttctcttctcacttatggctgctctctcacctgcctgaagatttctaggtagactaatcaagaaaaggaaattaacataactgagtatatattacatatcaaacacttgaatatggttactttatttcccttaatctgcacaacaatcccattagaaaggtattattacccttaatttataaataaggaaagcaatactcagagagactaagtaacttgcccagggtcacacagctagcaagtgggctttaactcaaagtttgtgtggttctaaagcatatgtcatttacactctaacatgctctaattagtttgttcagggctaggatcaacctagtataaaggggccaggggcagtaactacagagacatcctagatttcaggtaaaatgatgaggaatatgggaatggccaggatgcagtatagagctgagtgggaaaaatctgctttttgtcatctggctcatcaatatttgtttcaatcatcccttatttgtagtttttctcactcacaggtggtaaatagttatggtgaatgtgtcatgttggtacaacagattataaccttatatcattgctgattggtaatcagagaaaggaacctgacccaagacagggcaattactcccttccatgggaattttggatttggagaaagtgagaccaggctctctttaggtggctgtatctacagaacttgtgagctgttgttccattgtgttaactagagccatagaggaagcaaatctgtagaaagagagaaaaatgaagcagaggagagacacgttttaataccattcgggggcttgtttccaatcccaggtcagctctgcttgttttctttgatacattatggaatctttataatgaatttccctattgcttaagctaatacaaattgggcatctgttactttcaacaaagagttctaaccaagttgcctgagacttcacatttagtgatgaacaatttgcagcaaggggctaggcatgctttgtacctgggtgtgaagcttcccctctccccacatctctgctgtctctgcatgatttgctgactcctaatcttgtccactcactggtgtagacatcatcacagaacatggtcagctatcaccacatccagcagaaactcagagttaccactgtctatcctcatggggtcaggaagaacacagaccagagagagtcagccatgttgcttctgatttatttcagcataaattgcattttgaaggttctttcacaactaggaaagaacaaacaaaggagtacattctttttccgaatttgggttatcacctttgatttattttccactgctttgaaaaaacctgttcagccagattctctcactgctctggccactccctgggcagtgcagtatgcgctctgggaaacagcactcacactttctttaggctatgaggagtgtagagacagtaatagaattagtgataattgtataataatgagtcatttattgaaggtctgcatgtgagacatcgtactaagcactttatgtggataatcttatttaactctcacaactctcagaatcttcacaactctatataaagttgatattatttcttcccctccccgcttttgcagatgagaaaacaggtttagaggttgagtatcttttcaaaggacagacagagtaagcaatgaagtcaggaatcaaaccacacattcccactgcacagcctgtgctctgtagtaagtgacaccctaggccctgacagaggtaaatggtacctacacctgtgtcttcaggaagccagggatctcgtcccgattcttccattaatttgttttgttactttagggaaaatactcaacttttctgggccacagttttcttctcctttataaatgggattatctctgagatcattatcctgcccaaagccagaaaataacaagcactaaaggagggaagtttgtgttccaggcactatgtgtggtggtgtaaggtcaccaccaagcacagctggagggattccttaagatgggggacagaagaagtcatgtgtgattccattaggataaaagacacccatcaaaacttcactgggcatgatactttaccaagagaattttggggataggctgtgccctgccttctagaagtttttaatctagttatatcaccgaggcccactgtgaatgcctacatgcagtaggcaccaagctactggcaccagcaccatacaatctaaatgattctcaaggatcactttttgctttgaaatatctcctttgctggactaaaattctttcattagatacatggtttgaattatggtatagagtctctcaagatgcaaatactccagaagcaacagaggaggaaaacagtcaataatacctcaaggacaaatagcttatgagaaaattcaaagccaacttaccagaacaagaataaagctctaagggaacaagacctaaccaggggaatggtagagaataaaggcaagggtttaaatagagaaggatgggggcaggactatgggagttgggagctccacactgtggaccttttgggtggctggaagaaaagagaagggagaaaggagaagtattagggtagtaatatcctgaggggctgcagggcctgaatcttccagaaaacagttaatgatactggaaaggtaaagggaaggatctccaaaacaaatctttcacccaagggctgacctaccaattaggcatgggacacacagtgcccagggctcacaacagttatagaacagaaggaaaaaaataagattttaggttaaagaactgtttcaaaatatattaatttatctttttgccaacacggtcataaaatataatttttaatattttttaaggaataaggggcttcaaaggcaagggtacctatgttctatgaaagcctctcacctcttaactattgtatactgaaggcttattctaggcaggcactctgtggtgtaagtccttgtttaatctcatggctctctgaggcttgtgctcttatatacccatttcataagtgaaaaaattgaggttcctgacattaagattacacagtaaagatatggaggcaggatgccagcccagacatgtctcgttccaaagtcctaattctgaaccactagccatactgctgtcttccctttcggcctctaccttgccaaatgctgacagtgtgctggacacagatagcccagacagccaagacaaaagtccaatagaatgaagatgccttgtgagcacagggcagaggtaaaggcattcgggacacagggggttggatggcaaggagagaatgatgacatcactggtgggaggttgatggtgaaagttcaggccatcactcctgaggctccaatataggagaggaaagagacaaaggtcattcggtcagtcaaaaagatttactaagcaccagagagagttctgaaccatatcctatcaaatcatccctggcatgagggaaaatatgcagatgattaagccagcagcaggatgtaaaggcttccaatcagcactacactcaatctttgcacttttcccactacctaggtgggtgagaagcattttttattttgcatgataaatctgtgccccacaattacgtttaattcatgagactgtgcatttaatatcaccctttcactggccatccgaggaaggggcttgttttgggaatgattttcaacaagggaagtccagtctggtttgcagatgacacagaaatcactgtactttcttttgctgagatccagcaaactgtttcttttcactcccgtccttgttctcattcttccatttggacacctagatgctatttgaggcctgcggtctctgctggggaaaggcataggcctgtccggggcagggttccagacacagtagcctgcctgccccaacagctggggttgaaggtatgagaacgcctaggaacaaggaaaatcctgcacagcagaactggggctggggtcctcagtaaactgcttctttttaagtagctatgcttcacttttccaaaagacttgaaacataaactttctggagggatttgaaaatgccattattgcacaatcctctggtttctgtttcttcccctgcccccatccctttccacaaaataaatgcattctttgtctccggtgctgccctagaaacagggaatgtgccacacaaaggtaacaattcagtccataggtcactttttttcaccccaggtagacttctgtctttctcaaccaggcataaacacaagaaccaaatctgccactgcctacatactcaagggaatatcttggttccatcatctgcaaactttcctcgggctattttactcatggctgattagagataggactggggatagataacattagaaagagaccaatccgaaagctaatatatgactcttgatttgattcttgaagtaaaaatgtttaggatccaggaatagtaaattctagctcctcaagtacttggaggtgagagtaattcctttctgcctttccagtcctagcacaaaataggtttgtcaggctttttactaaacacagaaagaatcttcacttcttatttggccctaccaagatctgagcttccttgtattactagatattattttatggccacacagtaattaggtttgcccaaccagattttaagctctttgagggtgggcattcattgccttatacttctccaagtttctttcagtacctaccacaatgctgggcatattctaggtgttttaataattattcgttgacctcagtgcctgggaaacgggatccttctaactattgagtgggagcagtaaaacaatgctaaaaaggaggttgtgggttgtggggaatattttcataccaaattcacaagcaaattaatggttccaccagaattttgcttcagtgattatttaccttttgtttttacttttttaaagacatttttatacattttttagtagagatgcagtactgccatgttgcccaggctggtcttgaactcctgggctctagcaatcctcctgcttcagcctcccaaaggttatagagattacaagcatgagccaccatacttgcccattgattattttcctttaaactctgaagtcacgagaatgtgaagccctgagaaccggaactgtgaagaaaatgtattgtcactcatgtgaaccagaagtgaaggggtgtatgaagctttgtgatggacacaaagtgttgttgcccctcctgatgggactgcaaagctgggatgcaagttgaagccccatctggactccatgcccttcctgggtgaaagcactggagcagacatggagccagggcatgcttccttatgaatttcagtaactcgtactttcactccttcaagaaaacatgtgaggtgtttttgtttgtttgttgttttatgttttagggttttttgttgttattgttgttgttgtttttctttctttttttttttcttgagatggagtctcactctctcgcccaggctggagtgcagtggcacgatcttggctcactgcaacctccgcctcccaggttcatgtgattctcctgcctcagcctcccgagtagctgggattaaaggtgtgcaccaccacatctggctaatttttgtatttttagtagagacagggtttcaccatgttggtcaggctggtcttgaactcccgacctcaagtgatctgcctgcatcggcctcccaaagtgctgggattacaggcgtgagccaccacacctggcctttttgttgttgtctttagtgtaagggtcagaggaggcatattagatctttctagaaaatttgttccataactttgttccataaggtttggaccctgagaaatgttactagtttagtcaaaatagcttttttttttttctttttttttttttctgaaacaggatctggttctgtcatccaggctggagtgtagtggcacaatcttggctcactgcagcctcaacctcccaggcttaagtgatcctttcccctcagccactggagtagctgggactacaggaaagtgacaacacacttggctgattttaaatttttttgtagagatggagtctcactatgttgcccagggtagtctggaactcctggactcaaggtgtcctcctgccttgatctcccaaagtgctgggattacagctgtgagccattgtgtctagcccaaaatagctactctttatgaagcccaagataaagctttatatagaagcaggagcaatgcaaattcaggttctatatagagaaaagaagtcaacatactgcccttctgaaggtactcaataccaagctctcctgtattcaaaatttatttgatgccttccccacctcccctttcttagatttaatggttggcttgtggaagagtaactcaacgacttggaatttgcctcggaaacactcttcattacagggcagaaaaaaggcatttcatgatagcattttgtcagcgtggacacttccatcacttccctgtggagaatgttccaagtttatctttaaccaacaaaatagtcattgaggagaaagggaagggaaccagtacaacactacctcggagaggcagacatcttctcttatcaagacaaatgggaagctgtgggatctagaaagagcacaagactcaactgccaataaacctgggttccaaatgcttctctgttcctacttactgtacaagtctaaactagtcacttaccttacctgtatgatatggacaataataccccatgtctcagggttttagtggggcttagcaacacacatgtaaagcaccagcattattccaagctcaaagcagagctccatcaccggcagctctttttcagtcagagagatgaacttgaaccttaggctggtctgacacttcccactgtcatcctgactatcctatggacaaggcatgtgctagaaaaagagaaaatgaaggtaacaaaaccagatttttttctcctcatctgtaacactgaatttgtttacccattcattcaacagatacttatttagcaccagctgtatattctataagggtgcctacatcataggttaatgcaagaaccatgtagctaaagctcaaaaagagctcagaacattgctcttaaaatactgttttcagccaggcatggtggctcatgcctgtaatcccagcactttgggaggctgaggcagacggatcaccaggtcaggagatcgagaccatcctagctaacacggtgaaacaccatctctactaaagacacaaaaaattagccgggcgtggtggcgggtgcctgtagtcccagctacttgggaggctgaggcaggaaaacggcgtgaacctgggaggcggagcttgcagtgagccgagatcgcgtcactgcactccagcctgggtgacagagagagactctgtctcaaaacaaaaacaaaaacaacaacaacaaaaaccactgttttcaattaacgttagaattaacaaaaagaaacaaacaaaaaggaatttaccagtctgtctggaaacatagtgaaaaatagtaatacagtatgatcattgttctggagacttgagcatggccttattgttgtagatgggagagactctgcctaagaaagctagaaaaggaatcccactcccttataatgaagtacccctcaaatattcaaatgaatatcatgtttcatattatgatattctgttagtggcagtgtaaacaaaacttgttgtccagcaacaaggggatgtttatattaaattaaaaagttcaaagtagagttattttcccatgtagtctactacattaaacaatatcattctagatccattcagtgataaccaataggatgaccctactgactatatccttagtcatcctgactagttactgcaattgttataaagcaaggatctgaggggacattcagagatggaccctttgtgtttaacagagaaatgcacataatattctgtaaaagcctgaaaaatccagctgctttgtgcatgaaatactttaaccatgactcactttttgcccaaaatatatcgaagcaaatccaaagtaaatgctatgtctaaaatgtttgcaattctcatgaaatctctaaatgccctcctcagcagaatttacgatgcattaagtatcattaatcaagtggcttctctctctccttttgcttggagggcccagtctggaaagctttctctaaagggcatacctcaaggtccatcctactttccctcatattttttctccctgctttaatgattttagcactttctgtcttatattgttcttggtaattgattcaggtctgtaagtttttgacttcagtatgattatagaagccaacagaagagacagtatcttgtacttctcatccactcccacatgcccctccaaactctattccaggaaagtgctcaatgactgcctgacaatgtgacttatcaggcacctagtggcctgggaacatcagatgagtcagtttatggagcatctatgtttctctgccattggccatgaaccatgccccctttataagccatatagctgattcttagcaactctttgtccaactgtagagggaccactttaaatatcagcaaatcccatatggcagggagagtgccctaacagtgttcgagggttgtttattcattattttcgggtttgtacttggctaccaaaaaggtcccttctttttgggaaataatatgaaacacagccatccctaacctcatggcagcatttctcccttcatcttcagtggtttacccaacatcaatgggtatgaaaggcccctatcctgtccttccctgtctgtttctctcaggtcacattcttcattcttcttcaggctccttctgctttaagcgcggtaagcaatcaagtattctccatctacattcagtgactctgaccccacatctcgcctctctctgccccactgtgttctctggatagcaacaaaagggatctccttctcaacccaaactccagctacactacttttttgtttgtttgtttttcattctaagaacacaaaagatcatttccgtttcagatgcaggccttttgcatatactgtttcctctcaccggatatgctctgccttcatgtaactcttccttctcctatcatagttagctccttcttttccttaagtctcgacttaatgtgaccctcacagagatattccatggccattccatctaaagtacatgttcatgtttgttttccatctcttgtttcctttacagtacctactataatttccaaatatttttattaattagcttccaatttttaagtctgtctccacatgttataaaataaaccctagaaagggaagcctgagtcacatttgtcttgttgaccactgtatctcattcttaatataatccaaataaatataaaataaaaaagattatttaaagcaaataaaaatgtgtagaagaaaacacgtcgagatgccgaagtactttccgatggtggcatgatgataaatttttctcttctactttgctcatatgtctgtgccaatttttctacattgaacatatattaattaaataattaagactgaaatgaacatttattgaatacatctgcccttgctaactccccttctctgataatctgaccccacatttcctagtagagggagcctgaagtggaacatttcatttgtcccagcagactggatcaaagtagacagttgactcaagctgacccttttaaatgctcttctagtaatccagaactgaaacaaggtctttttaacagtatctgtaggcatttgaattaagagatatggaaggctgcctatattgtagtcattctcagccgtgcacagcaacagacagggaaagcaagtctaaagagataagagaataaaactcctgcacaaggagaagctagaatgagaaactagattgaaagaaggagaaggggagaggaagaagtgaagagggagaggggcaatgaaagggggagggagaaaaatatcctgaaaactttccaattcctaattccagaactttgggagactcaattatatctgctacagtagaaacaacccataaccttccaataaatctccccctctcccaattttcttttttgcttgagatacttcaagagggcttttattagctgcagcaaataattcccaactaaaacaaagaataaaaccaataatcacactcaataaagttttcataagataaattcatatttttcttgattaattaaagttgaaatgctggaaagaggccaaatggacacatttattttggtttctctttcaactttccacgtgtggtcattaatcccactcttccacatcttttatgaaagaagagcattatgaatgaagactgagaggtgccgttccatgacagcagaattccaacagcatgtctattgtttccacatctctctccatggcattcccaggggaggtctggagattacatctccaccaattctcccctcaatgcacaaaagcattctgaaagtaaaacttcaatctgaatcatgtttggacaacccaggactgcaatgtgttaactggtttggatacaatcacctggagacacaggtagggtgatcagacattttaagaggtccctgcaatttcaggctcatctttaactccattacaaaggaatgttaagcagcatttagaaggtagtttggcaaagtacctgaaagcaacaaacagcttctttgatgttcttggcattgatgtcatcattcttttgaaagttttgaagaaatatttttcttatagcaactgtatctaggctcaatataaagtgttgatatgtgttttctctgggctaatgttagcctgagtaactatgaaccatttagacagatactctcttagaaggtacctcaactttcactccagtctatgtttattttcacatcaaagatacatctaaggggaaattgcctaactagctctatgaaatatgaagaagtttactaagatatttggttataatggaaaaaaaaaaaccaaaacctacactccaggcaatttaagcctttcatgcctggaaatgagaatttgtaatggctgatagaaaaggtcctttgctttctataaggcctgaatgcagacttttttaaccaggcattaaaatcccactacttgccacttatggaaaatgtttcttgattatttaaatgacgttaggatggaggacaataaagcctttatattgtttgcagttcaactcttctttgaagcaatgtcctatagcaatacaatgccctcactttgatctgacttgctcagctcagtaattatatgactgagatgaattctccacctgacagattctaattcttcatgtgtggccatattctttgaagagaaaaaaataccacctcacctatattgaaaaataaaacttttggcaggtcaaaattgtgaatcaatggtaattctctttgtcaaagcagtaagccctcttcatttgatgagaatcactgtttctcagaacacgcttatgaatttcttgaagcttatctttaaacaagaatatgttacagttcctttctatgaattcatcatcttaaaggagagacagcagagtacactaacctgggccttgggtatctgctaactgactgcccctgattagaaggaaatatccacccattctgaatgggcatgagataatcagacacttcaaggacctcattctgtatcattccttaaagaacactttacagtgttgcttgagtctgcttaaaatttcaaaagcacagccttaactcagtgagtccctaatccttgaaaatattactgctgtttatttcatttgcctttcagacacaatgcaggacagatttaaacagagaaagctcaccagctacagccttgtaaattgcttttaatccaagatgtcagcaggattgatgccactgggacttaactcccccctacccaaaacatacatttcttcgctgtacctgcctcatgattaatatcttgtatccactcgttagattgctagctagaggataaagtgcttccttacacatgaccacttcgctgcatttgtcaagactctaaacatgccattgtaactatgaaaagagtcctttttttttttttgaccagtgtattttcttcactggcctcaaatctcagctcaaaactcactcctcagagcctaattctgatcactgctctattatttgtgcccctgaaagccattctgttcatggtttgatttctttgtgtatttcatgtttttggcttgtaactgttattatgtcttttgcagtcccccggcaagattataaacaccattttgtgtctcctattatcttttgaggcaatatattgtagtggttaagagcccaagctttggcatcagagatctgaatttaagtccttgttctgtcttctatgagataggagctttgggggtagtttatgtaatctctctgggcctcagtctcctcctctgaataatggggttaatagttccaattcagtggttgtagtgagtctcaaataagataatgtctataaagtctgtaactcaaaatgtgaccaataataaatgtttaataaatgctagtgtgacactgtgatataataagaaacatatttgctctctgcccctgggtcctggcatacagttactaaaacccttggactctctaacatgataagtgtttctttgtaagctaatgagatgactgatggctgggggctcctggatagcctcaggaggcgggactggttgccagggaaaccagccttctgatgagaggtttgggacttttggcttcaccacccaacctccagggaggagagaggggctaaaggttgcgttgatcaccggtggccaatgatttaatcaaccacgtctatgtaatgaggcttccataaaaatccaaaaggacagggttcaggagcttccaggttgctgaacacctgagggtgcctagaggtagggcacccagggagggcatggaagctttgagcctctttccaccaaccttgccatatgcatctcttccatctggctgttctgtgtagctcttataatatcctttataataaactggtaaatgttaagtgtttccctgagttctacgagctactctagcaaatgaatcaaacccgaagaagaggtgataggaaccccaatttatagcttgtcggtcagaagcacaggtcacaacctaaggcttgtgactggcatctgaagtgagagggagtcttatgggactgagcccttaatctgtgaaatctggtgctatctcaggtagacagtgtaataattgagttaatttatgaaacacccagttcgtgtcagctggaaaattgcttggttggtgtgtggggacctctccactatcaccaccaaactcctggtatcagaagtattctgtggtgagcgagagtagaaaacacactttggctgtctccatctttaatagtcagctattatttttatgtagtcttcggggtctcccatagaacacagcatgcagcaagaaagagaaggagtgaacggcatttattgggtgactacttaatagaagacactttctaaatatcatctcatgaatcccagctcccctacttactagtagtgtgaccttgggcaagtcacctaactaatgtacctcagttatctcatctgtaaaatacacataatcattatccttatagggctgcggtaatataaagattaaataaatacacgtagactgcttaaagcagtttctgacacatagaaactgaccaataataccagctattattgctattaaatccttacaacaacgttgagagatggataaaagaaacttcattttatagatgagaaaaataagactataaaagtgtaagcaggctggacacaatggctcgtacctacaatctcagcactttggaaggccaagacaggcagatcgcttgagtccaggagttcgagaccagcctgggcaagacggcaaaacccagattctacaaaaaatacaaaaaattagctatgcatggtggtggcatcttagtcccagctacttgggggactgtggtgggaggatcgcttgagcccaagagaacaaggctgcagtgatcatgccactgcacaacagcctgggcaacagtttgagtgtttcaaaaaaaaaaaaatgtataagcaacttgactaagttcatccagtcagtaattgaaccagattttcctgactgaaaatccatgctctctacaaaatgtattcagtagaggaaacatccatttcattctggagggttattccagggaaccactatagtgataagtaggccctcagagaactagacatcatgggcagggatgagagtcaagcaggcctgggaagaatgggtacaagtgagctcagtgagatgcagaagtctggtctggctttgacgccatgcagaggaacgtgggcttcattatgaagatcgtgggtaggcattagtggacttcaagcaggggagtgacatgtcagtaatgtattttggaaaaataactctaactaccaaatatttgcgtgtgggtgggagataggatagcttaagcctgaagatggatgaggtgtcagcactcagtaagagagagtgaaagctggacctgggctaaggtggtagcagcagacatggagagaatgagaaagaacttaggaaccagaaaccaaacaaagtttatgattaattccatgtgggaagtgtaacagagagagaggaattaggactaaatacaaatttccggattagtgactgggtagatgatggagttatttgctgctgagtaaaggaatgtagggagaggagtgtgtttcatgatggggatggcaggcaagcaaacgatgggttcaagtttgggcatgttgaatgtgagatgtctgtggggcatgtaagtggagacatcccctgctagtgagatattcaggtttacagatcaggagcgaactttggtctgtctgtgcagattgggttgaaatgcacataagcattggttgaaggaatgaatgtggctgtgagtgtctaaatggattgcaaggaacaagaagagaaaagggtgggaatgaaactctggggaacatcaagatttaaggagctaggaggaaaggaataaagtggaggagatgaagagctgaacgattatgaaaaaaagaagagagtgtttcaaggagggagtgagcaacctcgtcaaatgctacagaggtcacctgcgatagggcagagccatatcggtggcatctggcatttgattgtgattgggggcaggtgccaagttgcaatgttttgaggagtggatggaaggtaaaaaaagggaaacaaagtaggtagattcttcttcttaaaagctctactggaggaaggagagagaggacagtggctagagagagttacagggtagaagacttcctcatcatttttaaatacttcacagcagttggtacaatacttggtattttgtaggtacaaagttaaacattctagaatggaggattccgccatcttgcctaattctttcactttatgttgttcctagtcttccaaattttcctccttttctctatcccaacaggaaatgcagagaggctgcaattccttgttcaaatactaggtggaaggcatacagtttgtttcttctgcagtagctaaacaggttgtatgtaataggaacttccgtatgcatctgaagcagaaaagataagaaagaagccaggccacaataaacacagatattacagagaaagcatcggtgttgcattcaggtattcttttggttgggttttatttccaaataaatatacgtatatggcaaaatcttatttaaggaacaacaaaaaaaaatactccatgggagacttacaaaagagatggacggcattgagtgggttgaatgaaaattttggcagcatatattttcaggaaatctgaggatactaaaagcctatttaaaatagtatcctatttgatcttgataaccaaagatatttcaaagcatcaggattgggtctaatcgcttgttaaattaaggtcacatatgggacttgcttttgaccagacagtttcatgctcctgaataagaaggctctaataaagtttgatctttggatgcctatcatgtattatcaagcctatcattttctccatcaaagaaaatatagtcagaggtcagaaaataagggagtggggaggggtagtgggaaggacagagcaatccaacaacccttgatccatctctgcatcaattgagaccattctccactatctgtgctcacatagtaagcacacatcattttatttcttgcttttgcttcccatcatatttttaaactttcaatatcattaagtaacacccttttttcctccatgatagctagtgtcacaggtgcttttttcctcctttttattatttttggcagcagagagattttttttctctcccattgacctgtacctattcctagcaaattcactgcttcatgacaagcgccaacagtcatacgcagatgcaatttatctttgcgcgcagctggtctgtgtgcatgtgtgtctgtgtgagtgttcttctttcccattgtttgactccttttaactccactcagatctctctaatcacagtttggaattcacctgaatttccctgctgggagagctgaaaaagctgacatcaagttgctaagaccacagctctgaaaaggaaatggcacatctttattggtggaacacattaaaagatgtgaatgtgaggtttttaagtaagatgctgcatacgcataacctctaggtgcttgacagtgacattgtcccacatgttggccatctcctccataattaaagaaaagctttgaaaaaagaatacaagtgtttgattttcacactaaaacattattctgggaattcagagcccacagctggctatgcccaatccaaagcatggaaattgttcacacaaatcttttcatgaggttgagggagacttcagcattccagctatattctgctctgagggaaacattttaatttcttttgatttcttatgtgtccattcacaaggttagttttctttttttctaaaaaaaaaagaaagttgctatagtaacaatcatctatcacagggcccctacttgagtacttacaaatgctgctcgttaaacaagcagatccttgtgccacgtggaaggccagagagaaacatcagtatatcaagattgtcaaagattaaatggtgaaaataaaagatttttaaaaatggaaacagaagcatcagtggatgcttccatcggatagggcactctatacataacacagctatttctctaccacaaggccaaccaaacaatttcatagtgatcagacttgacagggccttgaagaaagcaattaagaggaaatgggcttaggccattcccaaagacagtctgatgtctggtttttgctcaaaactcagcagccatgttgtgtggcatgaagcatgacctggggcagtgtccatctcaggagcatggcctcgggcctgcctctcagaggccctggagtgaaagcagggctccgcccaagaacctgtgtacatccatttccttttcctgggagtagctggactaaaatgcctgagccgctgggtatgcttcttgacttacacaaatgtcaccaggagtatttgtgtgaagatcatttcagtctacgaagtactaacaggatataaaaagccatcacagaaccagaaggagaccattcttccctcccctctgattctactttctaggtaagaggaggataggcctctgacctcccactcttgccccaacttcaccttctgtgattatgtgtctgatatctatgcattagccatccctttcttccataagcctattaatttgaaagaataactgataatacaggcttgattgactcattactttttgtgatataaggaacataggtggcttaattgaaagtgttttcagaaagaaacagaaaaagaaaggcaagaaagaaagtgtgagggccacttggtcaactgctgagaagaaacactggggtttccctttctggttgtgggctaagcaaaagttcgccctctgcactatgggctctctctgcatttgagtcacagaaaatcagtgagcaaaaaggcaacaatacagaaatatgtttggcttcatcttttatgaacaatctgaattcagtttgcattttgcagggcaaaaaaaaaggatagtttttctagaaaatagatgggaaggaggaagaggaggaggaaaatagaacccaatagaaaagtctttaaaagacaaaaaaaaaaaaaaaaaactttgaggctttctttttcttagcgacaagctagggctactcacatttaatcatgctgttcaaaaggaagcatattgtgccaaaatttccatgaggaaaatttcactgccttgcattgttttatttcagactgctctttactttgagtctgtattttcaaattctttctttgaatatttatgcccttaggcagacatattaactcattttacattgagaatctcattacatcaagtaaaaatcctaagcctgataaaatgatttaccccctcaatttaacttttattttagtctcccaccagcttccctgaagtagatttgctgccaagctataatactattttagactgagtcatccaagcacactgaacagcttttactctgctcctaatgtttctccatccccgttgtttgaaaaaaaaaaaaaagaaaagaaaaaaaagagaaaggaacgtgtttttctatgggtttgcatttgaaatggttacgaatgatgaaaaagaaaaataggaggctttaatccagggtgtttggcccctagggaacatagactactctctcccccatctcttaactccctaaagggggcatgtagtgctatacatttttaagctctactgaggccttgaaaccactgaaagcatatgaaggcggttgtataagtttaagtacacaatgcttcatttattcatggagagaatttgaagtcattcatagagagtgtggttgaaaacacctactggaaaaattaaaaataaaaataaaaataaaacatttgatgaagccccgctctaggaaactgacataccatctccagagttggagaatttgaagaaaaaaaaaatcagggaaacaggccttggttttttaaacatctaatttaattatctttaatttgttaaatttttttcaaagacagagtcttgctacattgcctaggctggtcttgaactcctgacctcaagtgatcctcctaccttggcctcccaaagtgctgggattacaggcatgagccatcatgcctggccccaggaatcatgtcttctgagggaaatcctgaccattccttgatggttcagactttgctatgggcaaaaatattccagactgagaaaggtaccaagagtcttggtgagaaatcagtctagaggtaccagatttcagtttctgtcacctaatttcatcgtttgatcctaatctccttagctcttgttccttctcactccctcttccctccccactcagaacctcagtttgaaatgaattcatgcaaatccaccccacctatctctgcttttgcaagtcccactttacagcctctggcttctgtagcttgtgatctcacatactcacaccctccctagactcttagtgatttatattgttggctgtgctgatgggaaagcccaaaatatttttggaaataaagaagtagcatctaaagtttcaccagagaggctctcaccatgaaagggaattgtgaatactgaaaagtgttgccggcctccctcctttctgaactccttgagaactggttaaatggcagacttgagggccccacataggtgtctttgtcagtagaaaaggctcaggccccatctgctgagctaccatggcaaggattaagtatacctggaatgtggaacagagccaagaactctgatcccaataggcaaagaaataaacaggagtagggagggtggagagggaagaggtgagctggctgggatcaaaaagactgttgtcaagatctctagtgaggcagaggcagccggtatggaggttggttagaaactgagctgtcagaagtacgtttctgctgaggttcttcaggagaggacacggaagttcatgggctggcataggtcacagatgggaattgcatacaaagatccaaagatacaaggtagtgaggtttaaggggtacatattaaatgtttggtgctgtgaggtagattattggtctttttttgcttttttttttttctgtaagagatggggtcttgctctgtgcccgggctggagtacagtagcttgatcatagctcactgtaacatcaaactcctgtgctcaagagatcctcctgttttagcctaccaagtagctgggactacaggtgtgtaccatcatgcttggctatgtatttatttattttttggtagagatgggggcgtctttgtaggttgcccaggctggtcgtgaactcttggtctcaagcaaatctcttgcctcagctgaagcactgcgattacagacatgtaatccaccaccacacctggcggatttttttttttttaaaccccattcatactccaagtaatcctggctcagaaattaaattaattcaactgaccaatatgtgtctcatctgttacctcctgcagggtctgatcagtataagcattcgacaaatattgaatacctctgtgctgggctctgtcatacacgtgttcaaggagtcactggagtccagtggggaagactgacaatcaatgaatacataaaatgtcaggaagtgatgaatgctctggagaaacataaagcacagtaagggaagggagagttctgttttataggatggtcggtgatagtggagtagatacctgaatcagaagaaggtagctacaagcattccaggtcccaggatctcaacttgaagcactgagaggtggaatggaccaagtgttcggatcccatcttagtgtctattcaggcaatgttttcataggtccccaaagaaactggctttgatgaacctgaagagctatctcagcatatctatgaaaatcagactctggggctgagagggtctctccaaagctggtaaacttttttttccccaccctgacaagtctgaggccaggaagctaggtatctactgggattctaatgtagcaacacagacagcagaggggcattaagctcctgtaaataacatatgttttcttagttggaggcagggcagtgctttttggtttctctttataccgctataagtgtgaataatgcaattctgcttgaaattctacatgctttttattcctcatcagactctaactgtacactaacatttgcatatgtcccttctcactgggtgggttcttaaatggactcaatgtactctatgcttctctctctggggatgactgacaagagacgacaaagacaacactcagatattccaacccaacctgcagaagggccatattataacactgaagatttggattctcttggctccctgtattgcagtgggacgcaaacagagtcagcctgtagcacgatgtaccttttctgtgttctactctggtctgacaacatggcaagtaggaggtcctggcttgtgtgtgtaatttagagacaggttttgtactcaactgctaagctttctggtgttcagccactgggacatatggagctgaactctcagaatctctgcaggattgggaggaagaaggtgggaaaacaaatcaggtttccaaagtgcttctactaaacaagtggattcctttagcttgaatgtgttcccctcagtggaatatggtgatgattcatatgtatggcgaagagagtgaggatttcaacttttagtttatcaagagaatcactcaataatggatatattgagtatctactaagtgcaaagtactatagtagcctgtaagagaaacacacagaaataaaatacgtagcacatgaggaggacaacaaaagctaagtagcgttttataaagaacaaaggcaaagacatcagcaagaagttaatgattactaataacaaatgatgaattgaattgacagccattaattcaggtatctgaatgaactatctccagaaggtaaatcccagtatttttctttgtgagattaaacagggacaatttaagatagataaaatttagataagcagagatgtgaggggagggcatcccaagggaagtgaatctacagcaaatgtgggcagaaaggaaataaaaaaaatatggaagtcaataaggtacgggcacaccactagccttgcaaatttccataactggattaccttcacaaagcaactggactccttgacatacccagtatctgtcatgctgcaaagctctttttttttttttttaaattttttgagacagggtctcgctctgttgcctaggctggagtacagtggcgtgatctcagctcactacagcctcaacctcctgggttcgaaagatccttccacctcagcctcttgaagagctgagattacaggcacatgtcaccacacccagctgatttttttttgtattttttgttgagacaaggttttgccacattgcccaagctgatctcaaactcctgagctcaagcaatctacctgccttggcctcccaaagtgctgggattacagacatgagccaccatgcccagcacaaagctcttgtgctgagaaaagtattgcagcaagaatgaaatatgcaaataagcatcattaacaactaacccttcactaccttgacaatatacaatcttccacttagattagaccagaagattcttagaacaaaaatggtctacaatctgctgaaagctcaccacaccccaggacttaaaaattgtacttaatcaagacaatcagagttataagaagaagcctggaaaagaactaaaaaataatttggtctagggctctgccttttaccaggtgactccaaactatcccagaaagacttctgttctcttctttatatatatacagatcaaagacttccaaaagcaccctcattttgtaagaaataattgtgatgaataagaattcatcattctgttgaattcacccaacatctgtgaaacctgtaattgtaagacactgggcttgggtcatggcagatgcaaagttgacttatatttgatttcagtgttcaggaagcacatcatctggtagaggaagcaaacatatacaccaataactataaatcaaggcagtgagtgataggggctctaggagagcatgctaaactacaagctacttgcacgaaaagactgtctttttcatctgcaaattcccaactgcaatgtccagctatacggtttggctctgtgtccccaaccaaatctcatctcaaattgtaatcattgtaatccccatggtgattggatcatgggggcattttccccatggtttttcttgatagtgagtgagttctcaggtttaaaagtgaaactcctccctttgcggtctttcttctactgccatgaaagacgtgccttgcttccattcatgccttctgccatgattgtaagtttcctggggcctcctaagccatgtggaactctcagtcaattaaacctctttcctttataaattacccagtctcaggtatgtgtttatagcagtgtgaaaatggactaacacactcatcatatagtaatttctcaataaatgtttgttgaactaagaaagacatgaaaagggctaacagaaaacaatatggagagatggatccacaataatgaaggtaggaacaatcttctggctctgatttaggtcttgaagggaggaaaggaacagaataagtcaagaagtgatgcaaaaaaatctcctgcctcttgcttggtctgtagtagacatgagtatgtccgatgaacagccttgtcatagtatttctacataatcaaagacaaaaaaaaattctttttttttcctttaggttaaacacaacctccccctttaacctttactcttagtacctttttcctattgtttcattccatgatgcttcttttactctgaaccctctgtctctccatagtaaaagaaggataaaactccttctacatctattgactcttaccatttgtaaaaacatttttatgtccattactgcatttgattctcataatagccctgtgaggtgggtcaggaaaatcacagtatccctattataaggagaaagaaaagcagtattatggtaggcaggataatatcccctccaaagacattcatgccttaatccctgggacctgtgaatatgtgaacttacatggcaaaagagactgtgttctaaaatttagttaaggatcttaacatgaggtgtttagcctggattatccaggtgaatgtcatgtaatcacaagggtccttacaaggaaggaggcaggagagccaatgagatttgaagatgctacattagctttgaagatggaagggagccatgaaccaaggcacacaggcagcctttcaaagctggaacagacctggaaacaggttgtcccctagagcctccagaaggaaggcagcccggccgacactgattttagcccagtgaggttcatttcaatttctgaccccttgaagtgtaatgtgatgtatttaagttattttaagcgactcaatttgtggtaatttgttatggcaacaataggaaactaatacagtcacagtttaacgacttgctgaaattctcacataacccagttatcagagctgggtctagaactcctgtaagcctggctctatttaccacttggctctctctcttagagctactgtatttcctttaattaactattccttccccacacaccctcttttctatcacagtgcctcgtttctttcaaatcacttatcatgatttgtaataattttatttatttaaatattaattgtagctctcctcctaacagaatgcaagttcaatgagagggcataggccctaaatttgctcaccattaagtccctaatgcctacaatagtagtctgacaaatatatatttgcgagaagattcagatttttttttttttttttgagacggagtctcactctgttacccaggctggagtgcagtgacacgatctcagctcactgcaagctccgcctcccaggttcacgccattctcctgcctcagcctcccgagtagctgggactacaggcgcctgccagcacgcccggctaattttttgtatttttagtagagacagggttttgccgtgttagccaggatggtctcgatctcctgaccttgtgatccgccctcctcggcctcccaaagtgctgggtttacaggcgtgagccaccgcgtccggccaagaagattcagattcttaaggtatgaggatgcaacagctgagtagaggcagagaggctgccatggtggtccatggtccactgcagatctgaaggatcaggagtaatctatatgcacttgcttctttgggaagttgagatggaaactgtgtgatcagttgctgtccctgatgaccccaacagaggtcctctccacatgctcaggtatgaagccagaagcccagatcctgacagatcgcaccacggtgacactttactcttccatcctctttgttagtaagtctacctcccagctccttaagcactttgtttccactctgcatctaattgcttttggataattatatcattaagtctttgtaatgaataataaaaaataaatcacatctgtggagggctgtggagcaagacgctagggtaagcaaattgtcagttattttccctttctttgtcctcattcccctcctccctctaaccttctgaattagaatatcggccaagtggggaccaagaattgtatttttaaaagagtccctggatgatgatgatgatgatcagtgaggtttggaaaccactgacctagaggatgaggattctcagagtctaaaggagaaaccgaagaatgcagttaaattacaaagatcctcatgtttccttagttcttgcctccaaatcgctcaagggatagtgtcttgctctactcagtaattctagggcaagtgctgtgattttgaacctacaagatgggaaaatggtgcaacagtcccttgggaggtagccagattcataactaacgaaaaagtagtaatctgaaggcagccagagtcaggggggagtgaaggatactttggatgctattccaggtcacaggctcatttctgagagagagagaaaggttcctagatcccctactccgcaccagccttgaagagaatccaaaccccatctttggccctgggagacgctggcttctcagagtctctggcaccccagtggtctcagatcttggtcagaaataagcagactcccagggatattcattacagtatatttccactgagatatagacgttcaatatttgttcaattatagcttgaactgcctgctatgggggaagccattaacacaaggagacatgattccccagtaacaggaaggaaagaattggatttgtccagtggatattattagcacatggcaaaaaacatttaacagacatgtactttggtgaagtgtcaataaaccctcaataaacatgcttcagagaagcaccatattatttttgccttgcttcaaatttaaatttcagcttatcaaagtattccttattaatcataatgaactcatccagtattaatataaaattgttctgattaatgggctagtgctctggcatctttcaggtcaccacagtgaggcattctttttcgcaacataaagaaaaaaaagagagaagactagaaaggcagaaatgggaaagcaatgcccttaattttgtgtccattccatattcccaactgcgtgattttttttttttttttttttttttgagacggagtcttgctctgtcacccaggctggggtgcagtggcgcgatctcggctctctgcaagctccgcctcccgggttcacgcgattctgctgctccagcctccctagcagctgggactacaggcacccgccaccacgcccggcttttttttttttttttttttttttttttttttgtattttttagtagagacggggtttcactgtgttagccagaatggtctcgatctcttgacctcgtgatccgcctgcctcggcctcccaaagtgctcggattacaggcgtgagccaccccgcccggcccctgtctgctatgattttaactggcctgagaactgacctgtgtatgttaactactgccctggggcgacagcacagaaaagctcacaattctccagccatgtagatacagctatgctttggcctcctgacttgcagataatctctctgaatttctaaaacctaattctctactaaaggggtggaaaacctgcagattttttttttttcctctagggtgattctccaaactcttctgctctcccctggagctgcagaaaatccttcagcctacttaagtgccctactgtatatgggttctgtggagcagtcataaagaacgggaaagaaagtcaaagaagggagttgcataagaaatggatgtaggacaaatacaaatcttttaggctgggtgtgtgtgtgtgtgtgtgtgtgtgtgtgtgtgcacgtgcacgtgcatgtttgtgtatgagattttttccccatagaaaatataagcaattcagtcataagaaattctatctccaaggctgcagtaaactatcacacctgtaggcttttatttttcacagaggaccctgtaaaatccaaggcagcaaatcagaattctgtgtggtttagagggaatgcaaccacagattccagccaagagggaaaagctcaattataccattctttacatgcccagtctcgttctcagaaagccccatgtaagtgaaatgtgatccacgatcatggccagggcagaggaaatacaagctgcaagcccctgcattatgcatagtgaatatcctttaaggtgttggtgctggaacagcaggtctaatacccacttgcctgatgggcatgatgagcaaggatttctgagtgatgtcattccctttcagggactgtagttgactcatgggctggctgaatccatctattcaaaaccattcaatgctgagagtccagccttctactcctggatacttttgtgcacaggacaatcaaggaaggagatctaagatgatgagatgcccatgtctgtttctctcacactgtcttactgcccccactgctggaagcattcttctttcaatccccatccttccacaccattgactgcagtcatagccagctcctaagcagccccgtaaaggcaggaaccactagatctccaaaaaaatgccatcacaatatacctgagcaaggtgtgcttgagagacatttacagtcttttttttttttcacgtatctgcctgcttctacaggtgacagctcctccaggtcagggagctcacctgggtgttcatggagtcctccgcaactcatccagagacttgcacctagtaagagcccagtaatgcttgttgaataaaggggctggcaatttaccatttgcctttgatgtggttaatagcccacacgtgtctagctttgtggtcacatgcagtgcccccaactaggctacggtgcttccgtcctgtacagagaagtctgaattcagatatgatgacatttttagagcctgctttatagtaaggttgcaccagttattcagagtttcctctggaatcaccaagtggtgaggtaggaaacaagggaattagcagccactgcagcctttataaataagagacttctgtaagctgaggaacagtgtgcacagatggggaagggagggaggaggacatcggcttcacagacagaaattaagagtaacccggccggcatggtggctcacgcctgtaatcccagcactttgggaggccgaggtaggtggatcacctgaggtcaggagtttgagactagcctaacatggtgaaaacccgtctctactaataatacaaaaattagccgggcatggtggcacgcacctgtaatcctagctactcgggaggctgtagtaggagagtcgcttgaccccgggaggcggaggttgcagtgagccgagatcgggccactatactccagcctgggcaacgagcaacgagcaaccagcaacgagcaacgagcaaaactctgtctcaaaaaaaaaaaaaaaaaaaaaggagtaaacccagcaggtgtcgtgatttagaaatggctgtcacagttctgtggcccactgattcctacactatttcctctaggttctgtttctaccaatgttccagaaggcatttatcttctctccctctcttccatacacagcgttcctctgtgttggaagtgggagataggcatgaataagacctgtctctgcctttgaacactcacagctaggtggggaggagtggtgtgttagccagtaattacgacacaggatgttctctggtttgattccagtgtgctatggtaagagaaccacctaagaagaagaatagaaagatagtctgatcctggctttactactatttttttaacaagtcagccccaatttcctcatctgttaaatgtaaaccataacacttactttacctaacaaagatgattgagttgttttaaacatttattgagttaatccatgaaaatgcacactcaaaggataaagttctgtagacaccaggcctccttctccttatcatcatcatcatcactaccatcattatgattttgtctatttaaacacacgcgtgtgtgtgcgtgtgtgtgagacagagagagagagagactgcacatgaacggatgtgcatacacctcgtgaaagggcatgagaggagggaagaaggaccaccgatcaggaaaatacttaaaagggtccatgtagaacgaggaatcaaatgcaaaacctgccatgatttgcaaaaagaagctgcttatgtattatgctcagatgcagctttctcaagatattctcaatcctaggttctttggcttctgtttcctcctgtgtcatccactggtaagaatgagtgatggccgcattaattgacacctgtctcctaaattgggccttttgttacatatcacatgagagtcattttattattttattattacctttttataaagcattatctgcttgtggccattaagccaccactttggaagaaaagacattgctggcttttcctaagggagttaatgagttgcccttgaatgacctgagaagctcattatttatacagattcttaggggtagaggcagagaagcaaataaactgagagggaagagatagacactggacaaagactgtggttattcaagcaggagcactttgccttgcacagggtgacctttaggctgtgaggtccctgagccacactgtgcagagatggtgcaaaaatactcttcccatctccaagtctcagcatctgagacttgttaggggaaggtgcaggagaggcatgaggtgacatctgtaacacaagtgggtggctaccgctggaaggctctgacccccaccagacaaacgtcagttttacaaaagagaatcctgacatctgtgtacccagtctctccagggtctgggcaagtggacaggggagaagcaggttctgcagtgtgtgtgctgggttggcacacatattacgaaatcctacgtgtgtcagtactatctgcctgttctctgctctccgtgccatgaacggttcgtgttatttatgatccaagcagctcttgacatgttactaatggtgaagtgaaaggcaatgagtaaaggtcctccagtgagagaagcctaaaataaggctcttaatcatctcctcttccctttccttgtcataatccagaaaggctttttttgtacagcattagacccagcaataatatgaatttggccatgaggctgatgtagaaagttagggatcaaagcgttctttatgggacatttacctgctgagaagcaaagggcgtagattctggttgtaattgtgctagtgggcagaacaagagtggcaaagaggcccattatggtccctggcctacagaaaccccaaattcacattcagaacaagaactcagacttcaagtggagcctttcctggtacaccaggaaaaagctttccttctgatacggtcgtaatactttcgtgacatgctgacttataagccctaactatgtagtcagcatctggatgtgcaaggtgttatgctgggagatctgagggatataggacattgtcactggtcttctggaactcagagtgttgagaagataaagtatagaaacaagaatgtaagattttctgagagaaaatgacagcagtaaaaacaatagcagagaggcccggtttggtggctcactcctgtaattccagcactttggaaggctgaggcgggtggatcacctgaggtcaggagttccagacaagcctgaccaatatggtgaaaccctgtctctactgaaaatacaaaaattagccaggtgtagtagcatacacttgtagtcccagctagctacttgggaggctgagacaagagaatcacttgaacccaggaggcggagcttgcagtgagcccagatcacaccactgcactccagcttgggcaacagagcgagactccatctcacaaaacaaaaaaatagaatagtagagaaagcaagtactgtatccggattctgatgacgaggtgttagtttagactgaaaattaaagaggcttcaggcagcacattgtgcttgaattggatcttagagactgggaagcgctttgaaagcacagaggaggacaactattgcaaattggctgaaaaacaatataaatccaattatatattcattgattcattcaacaaatgtcattgagcagttctcatgcgctggacaccttgctaggcccttaggatatagtggtgaacaacacaaaaaaacatggagaactaagcgtgatgacagtgcatgtggtatggacatggggggggtcaaatggtaggtatgagaaaaaggcttgagcagtatggccagtgcagtcatctcaggtgcggttcctacaggctgccatagaacacagtctcatcacttgttgacccggtgttggtgtttccatctgcaaattagggaaaccacacccactgtttcttgaaaccattcgtaaagttcagcttgaaaggtgcagagtgttgatgggcaaaattacctaagcagttacatgtggtttctctttatctgtttcaactggatgggtgatttgttgaagtgtgcacaaggaaatcatgctaacaggttggccaatatgttaagatcatagctctccctgcatagtgccatttcaattattgctcagttaaaagaaagtcttttctctggattgaatggtccactattgttagattacttattaaaaaggattgataggctgaggctgttttcacttaggatttgtatgacatgttcataactgaaatggagagttgccatagttacctgagtgagctgttaaacagagcagagtctccactaaaatctctccatcaaggtcaactagacattttccatcagcgccaaataatttgctggctaatggaagttaatgaaattattaaaagagtagaagaaattgcaaatgaagttaatagggatatattttatatttaaatatgttttagtgaccagccatttctatggggttctaaccagctggaaattttggagtataactagacatctggagagaagtttagagtaaaaacacatttggattttggcacagattactgccttcgaatccagcccatcattaacagcttctgtacagtattgttcttcctccaggggcaataaaaatgaagcaaacctttgttcaacctaaacttcctttcttggtcagctgttcctgctgacttcccatcctagtggccctactgtttccattggaaacgtcagaatggagagaaccacagactgcttgctttagaagtggcatgttcaaatccagtaatgcaagaagaaaatagacactgtttatgaaacaatcactagcttagtgcttctcaaaccttagtgtgtatacaagtcacctggatatcttgttaccatgtagattctgattcagcaggtacaggatgcggactgggtgtctgggtctaaaaagctcccaggtgctatcaatactcctaatccagccgtgtgcagtggctcacgtctgtaatcccagcactttgggaggccgaggcgggtggatcacctgaggtcaggagtttgagatcagcctgacgaatatggtgagaccccatctctactaaaaatacaaaaattagccgggtgtggtggctcatgcctgtagtcccaactacttgggaggctgagacaggaaaattgcttgaacctggaaggcggaggttgcagtgagccaagatcatgccactgcactctagcctgggcaacagacagtgggaggctcagtctcgggaaaaaaaaatactcctagttcacacaccaaatcttgagaaggaaggcctttgtttgtttcatcatttgcttattggtatcatcatatacatatcaaccttatatgccacaccatcttcttgcttgacacacacatgatctgtcccactgacactggtgttagagtttgctgacactaagatattacacagcttcctatttatcaggtttacatggcatggtgcacctagggctctccaataccttttgtgggattgtgctctcaatttacaattaccactcttcataaacacgtaaataactcaataaacaagtaaacatggaaacagctcaaatgtagagttagtgacatgtttcatcacagggcaaaatggcatttaagtgatctttactctttagcaatgaatgaagcataaatcaaatgtaaatctgtcaactcaaggcaaaccagaattctactggcaggtggcattgacgaaaaaagtatagagtatgagtgaagtccaaaattgttatttatataaaacatggagtctcagtatggctcaggctgaaattttacagtatagtctatttttgaggacaatccattgttaggcattttgcgtgcatgtatctgggggatgggggtaatctatacattagccagattagccatctacatggcacaaatctactggacagtatctaactcaagatttaccaataatcatacatggaaaaaaggtgctcagggcagccgttatgttcaacttagagatttgcattattctataccagtctgaaaaatggcaccccaccttgaacatacatacactgaattggtcagattctcactttttcttttccttcaaaaaagatgttctaaaaataagtaaagaagaggtctcttcattatagaccagtggttcacctggaggactttttaaaacacagattgctgggctctacctctagagtttcaggtctgaggtgggcctaagaatccggatttctaacaagtttccatgtgatgctgatgctgctcatccaggaaccacaatttgcaaaccactgttctagatcattactttatacccttggctgcatgctagaatcatctgggagcacttttgaaaataccaacacctgtgctgaaatccacacaaactaaatccaaatagggggaggggtgggtagtgggacacaactatgggtaattttttgttttgttttgttttgtttttatttaaatttttattttagattcaggtggtacatgtgcagatttgttccaagggtatattgtgttatgctgaggttcagcttctcttgatcccaacatccagatagtgaacacagtactcaacaggaagtttttcagcccttactcctcctcctctgtccctacttttggagtccctggtgtgttcccatctttatgtccatgtgtacccatggttagctcccacttataagtgagaacatgcaatatttggtttactgcttcccaactatcagtaatttttaaagctccccatttggatctaaccttcagccaaggctaagaactactaggtataatggaaagttaccatcttgcagctgagtacaaggacattacctcaagattatactagcccaggtatattataatgattctgagaccataactgaacaaaataatgggcagataaaatgttccacagctatggagatataagcctgtggaatatttcagctctatcacctaatgtgaagattatcttcctggcatttgctgtgtgtgtgggtgtttggcacttggactccaaaaaggctgtcagttctcccaggcagggcttcttgtgcagaagataaaccagaggatccacctgcttcactaagtccactcctctcaaggggacttccaaaagggtgtcatttttctagtgaaatcataacatggttcagaaactcaagaaggatatgtgatacttctttctgcttcctcactcaacagctttctctacctcctgtctcatcacaatcttccagttggcaagaagttagagagggataagtaagaagattccaaaatgctctaagcttgccaagccataatatgtaccatggcttgctgttttaatcttgaagaaaggatccaatctagggacacgaaagatgaagtaaaatctataagttggattttagttgcgtttaagaattatttgctatagttagaacatctgccattcttacactcaaggcttgagatttctttacaaggaaaaaaatttaagattttaaaattctaaatagaaagattctccatttcctacaaatggtccttcagtctttgccttaactacttggagggaaatattttacttgaccaaattgtttattctgatttttttttttttagtaattaaaacgttattttcttttctttaaaaaatggaactaaaatacgcttcctattaacttctaccctttgtcctacaccaattgtctaggaccatccaaaaaaacctaattctttttctatgttagaaatatttattaaatgcctaccatactaggcatggaatgaggtacaaagatgaaacaatccctttaattaggggtagaaagacaaaagcataaatttcataacagagctatacaaaatctgtagcgagagtaatcacaactaccagaaagtctgagaactacctcaaaataaacactatttaagatgtatgttgggagaatgggtaaaatatcagcagggtccagggtagaaataaaaagatactccagacattcctgggaaagagaacagcatacataaaggcaaagaatgacaaaaggcttaatccacctagaagacataacaattataaatatatatgcacctgaaaacagagcttaaaaacatgtgaaaaaatcacagaattgaagggagaaataataaaaataaaaatagtttgagatttcaaaaccctactttcaataatgcacagaacaactagacataagataaacaagggaaaacaaagcttctacaacactataaaccaagtagagctgacatatatagaacatatacttaacaacaacttgttgtacacttgagaaaataatatatgcttttctcaagtgtacatgaaacattctccaggataaactacatacttacaattgcgtttatatgaaataccaagaataggcaaactgatagattcagaaagtatattagtagttacaggaatccatgaaaacaggaatatgaggagtgactgctaagggacgtggagtttctttatagggtgatagaagtgttctagaattagatagtggtgatggttgcacaactttaaaaattgcctgggtgtggtggctcatgcctgtaatcccagcactttgagaggctaaggcaagtggataacttgaggtcaggcattcgagaccagcctggccaacatggtgaaacaccgtctctactaaaaatacaaaaattagccaggcatggtggcacactcctgtaatcccagctacttgggaggctgaggtaggagaatctcttgaacccaggaggtagaggttgcagtgagccgagactgtgctattgcactccagcctgggcaacagagtgagactctgtctcaaaaaataaaaatatactaaaaagccaatgaattgtacattttaaggtaaaaatttcctagtgggcaaggatcacatctgtcttgcacagaaatagaatacatagctcatggtgtgtgcacgtacatattttgttctcacccatgtcacgtgcagaaaaagatctccaaaaagttagcctatgagcaggaaattaggaaaaaatgaatatgcaaaatgaggtgaggcatttgttgcagtaccttttaccctttaattcatttattcaacaaataagttattaaggacctattgtgtgccaggcctgcaaggtagtaaggattcagcagtgaacaagacagacaatagtttgccagagtgcatgccctagtaagtctaattacctcagaactaaccacatttagattttagatatcaagtacaaactggcaaagatagttatttttgcatttataaagttatagagtaattctttgatttacatactctgaagaaacaatatgtgaatgacaacagaaaggtcagcatgacagtaacaagaaagtagaactcaaaaataggaatctgttcatgtgtgtttgccttgttcacagacagatatgagtcattctgcaaacataaacctatagtggagatggatatagcgtgttcttagcgttctgacaacagccatgacaatatttctaccaaatactgtagctctgattccatatctaacaagtaacttaccttgtaatttgtcctctctacctgtaggaaaggattaattcatcagtgtatttgggtgttctggactgctgtatgttacagttctcattgtaaaagtccaagtggtatttgggcttatatattagtctcttctgagtttggcaatgtgagctatttctgaaagtttgataacatttatattaaattctgtaacatgatgaccatgcccaacatactgctactttctgatgcttatggatacaatattagagtaaaaattaaaatatgtctacttaagtgttacatctcattcaataatatatagtgagtgccttcttcattgcatgatatctacaaggagatatgtggatacagaatgtgtaagagaaaacatcgccctcaagtaggctttcctggataaagatatttcttgataacttttatccaaggtacttaaatttcaaacataatgaacacattgaaaaggaaccattaaaagaaatcattctattaatataaaataaatatattcctgtgtcagtgttctgcaacctatattctgatttcaatttttgttgaatgccatttgggagaatgtagatcggtaagcaaagtaaaatatattacattttcttatcattttttattagtcattattatcattttcttatcgattttaaaatttcgcaagcacccagatctgctatttttcagccatttacatgtcttcatgcatgggagtggtagcccgtatacagtcattacacacctggattattttccctatgaaagacctgtgtgaacattcagccttctcttggtcaatcgacttggcagaaaaacagtttaagaaaataaaaatattaaaatatggaatattaattgaaatatattttatgtttttaagaaacatatttgtacttcagatgaggagtatgagaatacaatagaaacctttaaaggctgtgtatattaccagataagaatggtttataggccaggcatgggggctcatgcctataatcccagcactttgggaggctgaggcaggcagattgcttgagcccaggagtttgagaccaacctgggcaacatggtgaaaccctgtctctacaaaaaatacaaaaattagctgggcgtgatggcatgtgcctctagtcccagctactcaagaggctgaggtgggagtatcacttgagcccaggaggcagaggttgcagtaagctgagatcatgccactgcactccagcctgagcaacggagcaagaccctgcctcattgaaaagaaaaaaaaaagaaaacagaaaaaagaaagaaagaacagtttataattagacattgctgacaattattctttgtagttgtttagtgctttatagctcataaggtctttgtaatggttctctaagacttctttacattctattagtctctgaatatgacttactgaagattatacagctaagtggcaggacacaggactctattttttcctttaaagtccttattacaaaataaatacaaactactttgtttacttgtttactgtgtttctcacctattgtgttactcaccactactaaagttccaggtaagcaggcaccacacctgctttattcctcattgtaccccaatgcctggaatagtccttgcacataatacatttttgatgcatttttaatgaattaaggcaagatatcaaatgtctctgattctagtgctttcctccttatacaacattagtgagtacttcaggattctgggattatttatttgtttagaagatcatgcttcccatatatttgaaggcagtcaaactcttgttcaaatactatactgaaataaaaagagtcaaagaagttttgctgtatgtaaattagtctatacttctttccttcaaattctattcaacatgtccagctacttgatacatagaaattttataataatattctctacttttacttaccacattgtggtaaaaagtaagtggcatgtttcaactaatccagccagtattgcttttatttcctcaagctaagaggggtaaacagaaatggttaccatggaaagtcataaataccactgactgctatttcctcatttgctactctatcatgtattaggagaataaaccaaactctccttctaaaagtcgagttgcaggcatgtgtagggcattacatccagagcttctgcagttcattagattgcccagctatagcagaagtagggatgataataacagtggacacatattgagcatttacccaatgcctggtattgcactagcaacatgctatggtttgaatgtgccccacaaagttcatgtgttggaaacttaatccccaaagcaagtgttgagaggtgaaaccattaagaggtgattaggcacagtcctcatgaatgagttaatgctgttattgtgagagtgagttagttatcatgggcgtgggttcctaataaaataataactttgtctctgttccccctttatctcttgcctttccatcttctaccacggtatgacacagcaagatggcaccttacaagatgccagccccttggacttcccagtctccaaaactgtgagaaataaatcttcattcttaataaattacccagtctcaggtattctgttatagcaacacaaaacggactaagacaatacattatctcatttcatcctcacaccaggcctatcagttaggcctgatatttcttcttattattacacttttacagaggaagaagctgatacttagagatgttaagtttttaaagttcactcagctagtaggtggcagaagagaggtcccaatccaaggctttttttttttttttttaaaccgtggtaatgattttatagtatttttgtgctggaaatagataactgaatgaaacaaaactgaataattacttacagtaaaggtcagctttttcttacaatttgtgtagctttatttcctaaaaattggcatttttttcctatctttagaggagtgattcttctggctcgctgctcaaggctgcattcttaattcctaatagtgacatacatctctgaacctgggaggtggaggttgcagtgagccaagatcatgccactacactccagcctgggcaacagagtgagacaccatctcaaaaaaaaaaaaaaaaattatattgaaattaactgtggactccttgcacccagctaagagcttgggacacagtagatacttaatagatttttgttgaaatgaattaattttgaactaaactttagtaactaatcccattaagtgaaaaccagcatggcaccaagccgacctgcactgaggtgccagtgaactcaattatacgtgatatgtaaacacatctaggaatcaacgttttgatctagagtatgaagaaatccaagactataggtagacataaattatttgaagaagtccaggttatatctaaatataaatctatacagtaagtcacaattatctaaacttttcccacttaccatcagttttctcctcttccttttttttctttgcagaatgagccgcataattgcttcaatttgccacttccctctgacagatgtagttatatgtatatatgtaatacatacacacatacatacatatgagttgaagtcaattaagataacaactgacaagaaattaaatatttaaagatgttgttgattatgtagttatcacaaatgtctatttagcatcccatattggaaagaaaaccccaccatgattatctcatgttggcagtcttcccccaccccccaaactacaactgctacatagttacttagagccttaattcacagttgtttatttcctgctttcacatccaaagttggggaaaacagaccatggtgaatttcaaatttcagagctaatagcatacttctagtatggtaggtatttatttaactttaatatgagaagttaggcatctgtttttctttcagctgatgacacagttcattttctcctcaataataaagaaatttcaaaatgcatgaaagcccactttttgcttcatttcctgtaaataactttacacttacttcaaagctgacctttcacttagatcaaaatccctgttactaagaccttgcagagaagagaactgaatcaataggatgaacattaaaataattgtatcttgctttatttactgtaccctgaacatctttgaggggttataatttctggggatgccctgagcactttgagtgaagtatctgccaaaaatcacatctgactagtgccttgttatttttttccactgttgttttttaaaaaatgccatcagggaagcttaactacaacaattctctttcagtgtcgtcaattttccatgagttcaggcaggccaccaaacagatctcaaatacacagaaaactgtaagtggaaaccgggttaaaagggaaggaaatgttgcatgcacttaatatcatagaaatcaagtataaagaacagactgctaaattgtagagtgaaatcaggttaaccatattgactggaaaccgaattcaaattaccttgcacttggttctggggagaaatgaggaggctttaaaaatagacaccactgtttttggcctttgtttaaaatagtgattcccaagactaaatttctcttactgtctcttacacgcctggatcaaaagaagcaaatctgactagtttagaaaaatctttagggaaaacccaattcctttgtctcttcaacaaagactttgaataagagtttaagtttgctttagcctgtgcattttaagaactggacaacacatgtactgggagccagaaagagtttcctcacatgatctaagctttggaattcctttgtttcttgcctttcagatggaaaaagaataacaagtatggtattgtccacaaactcattgaccattcagtctccattttaatatactacacatacactgtgtgagtgtgtctgaaagacggtgggcaggggagacagaagaaactgtgggtgtttatggttaatattaatcacttggataatgaatattattattagaaaattagaattttataattgcattaaacctgaaaattattaaatatattgatctttaatacttggttcctaagactgttattttttaacaatcttttttatgtgctaattatatgaaagggtagtctctttcagtgaaataattccccctttccatccttttccccacaatattcctgtatccatcaagaacaatgtctttataactggtaggctttttggcctctgtcattcctattttgaaccaaatgattaaaaaatgactgtggtaaatgttagctaacttggcgttattagggccaaaagaagtccttcacatatttaggctaataagaacacaggattccggttttttgtatacctcaagatcctccttttgtaatcaaagatttgaacacccaaaaatggtgacatgaagcaaggtggaatgccaaaaaatgaagaaaaatatactttcctgtcgtccatgctgatacctgtgtttgttggctgaatccctgaaagctattcctttgtctccctcttcaagtactgatttccagacagccacctgaccgccacctgagctcatattactgccccttgcctaggagatctttgtatagctcctaactctgaagctttgtggccaaaggaagttatttatgccatctgtaaaagagggagcaaaatggctgcctcttatattgtgttccacaagggtgctcaggaaatttatgaaaaatctattccagtgactgctgagatatgaatgttgaactcctaatggctgctaatgggcgatcttattgcactcttcctgttttccttacccccaagtggtcagccagcattcagagagggtaagaaagatgggggggttggtgaataatgattgccgggtaaaccaccagggactgggtttgataatgcatcctcacttggaaatgcctgagcaggaagcacctccgagacatagtccaggaaggccccaaaaagctttccaggtagagatcggtgagtttctatgatccccagaacctgggaatcctcctgacaactttgtattgtcctagggtgcttgatttatctggctgagtcccttacttttatatagaccagttttctaaaacttgagggcagatgcttgtcttctaccataaaatgctggtaagaaagagatttcacaacccattctaaaatttaatttttctttagtcttccaaaaatatgaaaagtcactagttatactttctcatgtagtaaattccagaactcccttgtcatttgatacttacaataccttacaaggaagatatgccagaaccatgtggtaataaaacctttttccatatatatattggtaatgttccacaaaccaaatcagctttcctaatacaactttgtacagcgatcagatacattaggcctatcactcaccactgaaaaaagacagtggtggctcacacctgtaatcccagcactgtgggaggccgaggcgggcagatcacgaggtcaggagatcgagaccatcctggctaacacagtgtaaccctgtctctactaaaaatacaaaaaattagccgggcgtggtggcgggcgcctgtagccccagctactggggaggctgaggcaggagaatggcgtgaacctgggaggcagagcttgcactgagctgagatcccaccactgcactccagcctgggcgacagagcgagactctgtcttaaaaaaaaaaaaaagacagtggtatccaacaattatcatatcaaatacttgatatataacagttccttttttttttttgatatatttaagagagaataagaaatccccaaccatgttaaattctttaccaagaatcacaataattttttgatccctagagaaaggtgatttgacagcaggaaatctgacctctggggctacctctcccctttacctactcataatcattttggtcagcaacaactgttgtttttcagtgtttttcataaagacagtgcagaagctcagggcaataccagatgatggcaaagaccaaaataatacaaaatactcaagcaaaggcaaacattaagggcctttgaaatttccgtctctgttgcctattcccactctttccacccacatctactctccgtgatgcaatgaaggcctgggtatgtgggtagtaatgactgcataattctatctttaaaaaaatctattgaattaaggaagctgcagaaaatgaggaaaacttattgaaaaccatcagaacgaaaagttctcaaacccaagtaaattgctgctgaggcttatcattgatgatgtttcactttctttatgtggttaattgcttcctgcctccatagatgattttatccatctttatcagcttttgttttgttattagtgcccaggcattggcatggttcatctggtactccattagacttgtggcaagcacaaaagccaggactaaaggaagaaaattaattgcttaccctgctaatatcaattcattttcaccttcttgctttggcctgacttcaccatactgttgacaagttatatttttcttgttagttctttgatcctcaaaagctaaaaatcagcccagatagatgagaaagaaaagacagcattaaaaccactgttattgcctctggtgaggtatgtagttttgggctaaggcacagcccttctgcccaacatgaacaggctgagatgaatctaagccaattttgatgaatggccagcagaagacaagatcttggagtttctttgagcaaaccataagaagctactctctaaattttgctgactttataccagagctcttacatgcagaggcacttctcagctccagttgatatagcctggagcagtgctgccagaggtagcagtgttgcccctagacgtcactctctccatcgttcagtagttcccaaaggaccttccaccactccagatctacatgacagatacctccagagtctagaacttgagggtcaggcggctcttcctccctctagagcccaccagtctggattagggtaagcctatgggctaaggaggtcaaatacacttgactggctccatttattccatcacgggccatgctaggagctgtcattttagggacacacaggaacatcactgtctctgtctttcaaatggctttatttgctgcttttgactcaggactaggttggccagatgtaataagtaaacatataggatgcctagttaaatttgaatttcagacaaacaagtcatttcttagcataagtatgtctcatgtaatatttggcctgtctttaccatactgttgaccatatctttattgttagttatccaatactcaaaggcttaagataagcctaggtatatgggggaagaaggatgacatgacatccttctggtgaggtgcttacttttaggctggagtgcagcacatttttagtacaaatatgtcccatgcaacatttgagacatactggaaaacaaaacaaaacattatttgctgtttaccagatatttaattttaattaagtatcttgtattttaatatttaaatttaattaaatatcttgtattttacctggaaaccctaccaggacccttgacatctcccctgaaatacaaaggagcaaaagattccctatgcacagatagttctttatctttatactacgtaagaggccccagctagagccccagttgtgcttaccctgagaacagggcatatttaggtctgtcagatggagaagagaaatcccaccagggtccatttaaatgaggaaccaaagagtatcgcaagaaaaaactcatcctcagggatgagagccaaggtaaatgagtttgaggcactatcatagaaaaaggggtgattctgagcacagaagacctcctccctccgattgccttccttctccacacataaggaccaggccttagcaatgggggtggtgatacaaagacacagggcataaaacaaacaaaataatgtagctttggaatcaggagtttctgtatcagcaggggagcaccgtcagcttgaagctaggaccgcctccatgtccacatcgatgggcactggcagcagagctggcactgtggccaacattaccaacagggctgtctctgcaggtgctagcgggacgcatcaccacagcaatctgaggcaggatgagagaaaactagccaaggcgttggggcgatcaaaaaagctagcctgagaagatattcatttaattaacatttaccaacgtatagcatgcagtctgttatgtgtagctaacagtacaatgaaaagatatgatccctaatgtcatggtgctcacaatctagtgcaggaaagcaacaagaccagagacaatcacaatattgtatggatagagctataataatttgcaagcacatatgaggggcacctaacccctcttcagtttggtagagtaggttttctgaagaaatgacttctatgttgaaacccaaaggaccagtaagaataattcaggaggaagagtccatatgaggtgcccctagaaaatttctcatctatttgggagaaatctgaaggggctagagttcccatctgaatgatggaagaattagggaaatcttgatttgtgaatgttactctgactctctttttccctgttaaactggtatgactggaaaaatacccaccacttgctaagggcttattctgagagttaacattgagaaaataccatggtaagcgtaaatgacatggagatctaagatctcataaccctcaggttccagtacgatgttattgcagattctctgcagcacctcaccagtttgctgacattacataggcaaacagtattctttgccctatattttgcactttgaaagtccttttatactaaagaaagtattgccaatgccaaagaacgaaattatccttccttcccattgtcagatccaggaagggatctcatttacaaaagcaacctaaatgcagcattgatgaggttattgcttctcctcttgacgtatctctccatcaggttttgcaaaactgatttctcttcctctggtcagagcagcctcaaaataataggtttcagaataagaaaacaactatttttttgtttaatcttaataatagggtatttcaggtttgtctaatgaaaaccagaagctgatgatctaacacaatcaaatactagcttttgtgcaaaaagaaatagtaaaataacgtaggaccttgtctaaataagacttacaactgatgccagctaaatgggaaaaaatagcaataaccttttaaaacattaatttagacttttattggaatacaaaggatctctagtgtctgaaagcaggcattgtctctcttttttatttcaacagaactgtggcttgaatacaacacagcagggtgtgtgttttctaaagttgggtcattatcagagtgttcactgccgtttgccaataagcctttatttggcaaagtttaaaactgctgacaaatgggattcttcctgtagcagtataacatggtacagcttaaatatgcctaattacaaaagtcctccaagggcagtcaagaaatctatgcttttgagaagattcagatggacagtcctcaaatattaataggaaacaggaaaatctttgagccctcggtcatgtcgctcttgctcctattattatggattttaagttgcaggggcctgtgagattattcaaaacaatgtctagttttatccgaagctgcagggatttccgatttccataaatttctctggagacatttaagaggcggttttttacttctgcacactttggtccgtgggtttctgtgggtgtgtgtctgtaactttccttccctgttctaatttgtccctgttcagagacaaataaattggaagattattatccaaaactccaaacaacattaattccttgcacatattttgtgcttttagactccaagaatgataatagacaatctctttagaatgtggaagggggaccaatgtcaaaccatttaatcacaatctccacctccaggagcccctctgaaagaacagaagccttacttgaactggatttcatgggaaaatctgtgccgcgaaccttgctctctaattatagctgggggaacgtgaggtttgtttggaatcagatgtagctttccactaccataattacacattttatttcaaacacctcactgcagtgtttgaagatgttagcacaattgcactaagtatcatcctggagttcttgcttgggaggtctggtagagaatgaaggaacaggacagcaattgaaatgatgagtttataggagtctaataatttcatggctggaagtatgacataaagaaatgagcttgggctttttattcagagctgggagttctcgtctcaattctgcagcctaactgataagaccttttactaaccaggtaaaacaattagcaactgggatcacattgctgggaagatgctgagtaacattaattagagtctcaaaggactttaaacaaatacgtacatctagagaagaatttttataatgtagttaagaatgcttattgagaaagaaactcagtgtctataatccattgctgactagcatgcttagctatggttaaatcttccagtaagccaagaatgaggggagaagagggaggcaggttgggacgaatagagtaagtggtagaagtgggttctgttcaaccatatgtagaggaattaatcagctctttttcatggatttagggccctcaatccctatataattcctcagatatttgtgctacctgcccccttcccctccatgtagctgaccttagaagattagaagagagagaccactgggcttattatctgatgaatggctctgtttttactgtgaaattataggaagtggtttaaattgagaataatagaaacagtaacaaataataagaatacttgctatcctgtgttagatcatctggcaggctatctgatgagagatagggtttcatctcgggaagttttagaaaagaggccagatatataccaagtactactctaggtatttcacagacattttgtttcactcttatacaaatcccgtggaagagaaatgactttcctcattttagattctagggagtgacaggggacaagtcaaaggtaatttggagtgaaggctgccctgatcaacttccaatgcattggattattttcatttcatcattttctcagtgctatggaatctttgtgatccattaataatattaataataatccctacatttgtatggcatttaatactaatggttttcaaggaagtttcacatgcattacctcactggactctcaaaaacaagtctgtgggttgggcaaacaggaattattaccttcattttaaaaatagtgaaactgaagctcagagaggtggcatgctttatttagggctaagaccagagtccagcttctgttagaactaagccttgcttcctgttttccctttggagaccttgaggaagaccatgagccgccaaatagctaccatgatattgctaaaccctgtaccaactcgtggacagtagtctcattaaacgctcaagatccttggatggagaccaagaactctctatctctgcaaaaatctctacagaaacatttttctctttactctgcctcctcatttaaatgctaaaatatttacagtgagtgataagtcagataacatcatgctgccttgtgaatttttagggaaaagatgaagagcacatgataaggctgggaattttcaactgcctggcacagtggaagaaatatttgtctaggtgttaagacgtgtgggttctggtcctgtctctttcacttattagctgtgtaacctgttacttgttgtgttaaaataaatcctctaacagtttcctaagttattaaagggactgtcctgataaaatcatgatgtgtgagggcttttaaaaattgtatacttgttcgggcgtggtggctcatgcttgtaatcccagtactttgggaggccaaggcaggcggatcacctgaggtcaggagttcgagaccagcctggccaacatggcgaaaccccgtctctactaaaaatacaaaaaattagccgggcatggtggtgggtgcctgtaatcccagctactagggaggctgaggcaggagaattgcttgaacctgggaggcggaggttgcagtgaaccaagatcatgccacctcactccagcctgggtgacagagcaagactccgtctcaaaaaaaaaaattgtatacttacacgtgtgtgtgccacacacaaacattgtgacatgcagtatgatcacataaaatatggatgattttcaatctactcctataaccacaaagtgagggaaaaggtttatatatccatatcattgtggtagcatggtatcttacataagagcaccctcaggatataatttttataatattattggtagcaggagcttaactatttgaaggaaaccagataggtttcttataaggaattccatctcttgggatccttgagcaggccatgagatctggtaggttttgacaagagaaaatgagaaaccatgctcagggccagtctggctatatgtactcactacttgctcatagttgaaatgatttttaagaattgtatacaatattgctattagcagtgaatcggggaggcaggacaggggacaaaccatgggactcagagtcagaaagggctgagtccaaatctaagatatatcacctgccagctgttatgagtctgttgtctaacatttttgaccttcagcatcttcaactgtgtgagctgatcacaccatatcatagtttactttgaggattagatgaaatctctgtgtaaaggacctcaaatacttgccatgagataggtactcagtaaatggcagcatcagggttttctacactcctcatcctacaacatggactctgaatacagcagtgaggcaggattgtgtcatccaaacttgaggattcctcatctattgacagttgttcatttgggtttgtaagagagaagtagtttgatgttgaaaatgctgttggttacttatttttgttgagattctttaaaagtgaaaagaggcagttgacagccttttttaatgcagaagctctgagaaaaatggtgccagaccaacctgttttggcacactctttgctgaaaatgaaaggccatgtgatctcctggggatcatgagacttgagttcaacctttcagctaccccagagtgagatcatgttctatccttcatttattaagaaaccatttatagaatacccacttatgagttagtgtcaaactcattgtagtgtacttagtatctggctcattgtaggtgcaagaaaatttgtaataagtaattatatgcatgactgaagaaataatactatatatgctatacagctaaacttttttcctcaatacttccttttctataagatgagtgatgtggactataatctcccagctacccacaaatccccaagttttaacttatatatttacatggctttagatacaatctaggtccctacatgactgtaatatggatacataaaagtttatagcataacccttatttttatacttcctgcacttatcatttttttcatcctttatccttgaattcataacagtcttaggaaatgattcatgaatgcattaaaccctcccttaatcagatacatgaaaaattatagtgttagtttatatttttttaaatcgtagatctgatttatggcttttatagttcaagtcagaaacttttggattcgactcttccatgagcaaaggctatgtgctttaagtagaaaaagtttctttaccttttccacgtaggtgaagaaacaaagacaatttaactaaaactttccttttttctttctctccattgatttctggctaaaacccttcttgggcaaattttgcaccaaagtaaactggttataaggaaaggaaaatgaatttagagatgatgtagttttttacactccagtatgatttccgaatctatcacatgcacattgtaggggtattgttcggagcaaagtatgcacttggggtacccctgtgttgtgtcttaaaagggggattgtttttgccacaggacatagaaaagaatggtctgatgcatgctagtcacatcacctgccactctgaaagaacagtcaggggctttaggcataatgaaaatgaggagtaaaatgctgggtgtttatctccagcattccagatagaaatatatctctgtccaatgagaagcatctcctttaacaagactgtggtgcattcatctctcctgcgtatacacgacgagcacacctcatctgtcacgtcgggacatgttaaaaggaaccctcttcccctgctcctttctactctgaataagtaattatgaaaaacaaatcattgccatgtctctttctttcttcatttttattgggttttgtctgcctgtctcccgtggacataaagaattgttctgttcattcagattcaatgattttctttggggggttgtttcagataaaacagaaggtctgattttgtcaggcatgcagctctgaaagtctcttagagcaactatacatatgaatttgagggccaaatgtcaccctctaagtgaactgaatggagaaaacacaatagaagtctgttaaaatgctgctttgggtaacatgaaaaaaaaaaaagcctaggtgtggtcattctttctggaggcctggtaggtgcctgtctacactatgatttgcagggtgcctacccgcctgaagctgaacattattttatttaatgcattgctttccctgaaatgttggggatcaatatgaagtggggaaatgtccttctggcctgaaaagtctgaaaattctgaaaaatacacacacacacacacacacacacacacacacacacacacacacacacataagcacgcacactacctgataggagaaggcaggaagaagtagtgtgtgtgtatgagaaagacagacagcacatgtgtgagctgattagatgatctcataaagtggtttggaaaccaaaggacagaggagttgagacaaagctttaagtccatctacattttgacgaatggattctgcccaggcaggaagctagaaaggcgtaaaacaggcccagttagcatggatgtgaaattgatttctgaatcctgacctcacatatagccctattgcttaaggcggcatcttaaacctcgtcactttaggatctccctcttaaaggttccagtagccctctgtgacgaacattgccttccactgtgacatgcaacccagtcatgtgcctcatccacggtatcacagaagctcttcaaaattgaaaagtaggccaggtgtggtggctcacacctgtaatctcagaactttgggaggccgaggtgggcagatcacaaggtcaggagtttgagaccagcctggccaacatggtgaaaccctgtctctactaaaaatacaaaaagaaagttagctgggcatggtagcatacgcctgtaatctcagctactcaggaggctaaggcaggagaattgcttgaactcaggaggtggaggctgcggtgagctgagatcacgtcactgcactccagcctgggtgacagagtgagactccgtcacaaaaaaaaaaaaaaaatgagaagttaagttttcagccaggcgcagtggctcatgcctgtaatcccagcactttgggaggccgaggcagatggatcatttgaggtcaggagttcaagaccagcctggcccacatggtgaatccccatctctactaaaaatacaagaattagccgggcatggtggcatgtgcctgtagtcccagctactcaggaggctgaagcaggagaattgcttttgaacccagtaggcggaggttgcagtaagctgagatcacgccactgcactccagcccaggcgacagagtgagactctgtctcaaaaaaagaaaagtaaagttgtcctcagtctgtctctgtttgcctctgtctgctctctgtctccttctctttgtctccttctgtcttctctcggtctccttctccttctctcttctaaatttctctgctgatctctccttcttcctttgtctctgcctggctctgcctgtctctctgtctttatttgatccaccgccatgttcttaactgtcacctcaatgcatatgactcctgagtcatcatggccagtactaaattgtcttctaatttgtactccaaaacttctaactacttgttggatatcttcgcctgaatattctacccctcaaattatcatgtaccaatctaaattaaattcaatatctaaataattgacttgaaatttcgttaacaatttttgacaaatacaaaagttattgccatcacagcaagaaaagctttgctcttcctcctgattcatacatcaaacatttactgagtctctactatgtgggagtgatgaagtcacaaagctgaaaaagataatccctgctctcacgaagctcagcttcaatgacaagtgtgtaatcagaatacacagtgcttggatatgagaccttgcaagataaagtgagagcacataggaaggatacctaacccagactgggagcagggagtgggttagggtgcccgggaagacttctgggaagtagtgacacttaccttgaatcctatgggttgtgtaggagttaatctagtaaggggatggagagagacgtcagcatttcttgaagcattggcaacagtacacaagcccagacagacagcctggcaactctgaggaaattgcaagtagttcaggatgatgagagcagagagttagggcagggacatgctcaaagcacccacacccacagctttggggtcttagagtcattaatgagcgacccattccccctcaccctacataagatagtattaagccctgaaaatttgactgccaccagatagtcctcgtctccatccctgtggtcactactctagttcagacctgctttacccttgtagggccaccatactaacccctgcttgacagtttccaggcctccccaactctagtttattttgcctcccattacagcatttttctgaagtctccctgcttaaagcgtgttctacagtctagcagcatcagcatcacctgggaacttcttggcaatgcagcatcttaagcccctccctagacctaccgaatctaaatgtatactttaacaaactcttttggtgatctgaatgcacattaaagtctgaaaagcattgctttcaagcatagctctacttatctcccatcattgctgaaacacaaaaccttctgttgctcactggtgcctgctgaatacacttcaaactccctcgtctaattttcactttcttctagcctaccgggacactttcctttttcagaacatgctccatccatccttcctcagctcctgcctttgcccttgcctgggacactctttcacctctctttatccttctgatccatagggctgagctaaaatgcagcgtctttcttgatttctccaaggggtgcctctcccatcattgggcatccaaaatatttccattatttcttcttagtctgtcatatcttgcattacagttatgagttatatttcttgacagcaagtaatccgaaagctcctgaagggcagaaactatatctaactcatataaccggcccttgatatggtttggatctgtgttcccacccaaatctcatgttcagttgtaattctcagtattggaggtgaggcctggtgggaggtgattggatcgtggggatgctccttcatgaatggtttagcacgaactcctcagtgctgttctcatgatggtgagtgagttctcacatctggttgtctaaaagtatgtagcaccttccccctcttcctttgtcctgttcctggcatgtaagacacccgctcctactttgcctttcaccatgaataaaactcccctgaggcctccccagagcagatgctgccatgcttcctgtaaagcctgcagaactatgagccaatgaaacctcttttgtttataaattactcagtctcaggtattttttatagcagtgagagactaatacagcccttaggattttagttcataggtgatcaatacatatttttaagataaattgttgaaaaaatgtttatagctaggcatagtgacttatgcctgtaatcttggcactttgggaggccaaggcaagagggctgcttgcacttgaggctaggagtttaagaccagcctgggcaacatattgagatctcatctctactattaataaaaatattagccagatatggtggtgtgcacctatagtcccagctacttgggaggctgaggtggcaagttcactaagcccaggggtttgaggctgcaatgagctatgattgcaccactgcactccaggctgggcaacagagtgagattctgtctaaaagaataggtgaaaaagagtaactgcatattgttatcaacagcaaaagaaatgtagactcattcagcactcacttggtaacatccaacaaatgacctctactggatttaaatgacaaatcgagaaacaacttattcccaactactacagctattaaaaatataatcgacagagaagatagaacaccagttgaagttctgtccaaatgtttaagtgttaaaactctgcagttctcacttaccttaaatatcatatagcacatggccagcaagaattctaggtgtataaaactcattctctcttttcttccaactaaagcgagggaccgtgggggctagccataaaccctttgatcattttcttcagtgtatcatgtgaaatttgtttcagtctcctgacacatgaacacatttaccagaaatattccttagagccaatttgtataaagcaaggaagagtcatggtgggtgtagcagaaacttgcaatgtttccaggcaaggaaatactgtgttcacagaatgctgatttggtaaaagaaggagaggagttttgctgggagaataccaatgtagtttaacaatgcagctcaaacatgtcggggcattctaggtgaccagctctcaatgacaagccctcaagacaagcagcctgcctgccagaatctcacagattggatgcaagcaagggaaatgctccatctatctctctcaaggtggaggaaccaaggaggacactgcagttatattaagtgattctaattatcacatttctacagccagaatgcagggtagttttacccactgattctcccagcaggagccagccagaagaaaaattaagaggatgctttggaaatcttcttttttcatacttaaattcatagatggtcaaggtataaaatttaggccccatctggattttctgcttctgtttttagaattttttttttttttttgcatgaggtcccaattagtccaaaacaatgaggcatcccttaatcccaaatgacgcttgctcctacgcctgtacctttccttgtcctatcaaaacatcaagacttgtagtggtattatttgttaggaggaccacacgatggcagttaagcatgtggtccctggggtcaacccacttgggttcaagtccttaccctgcctcttcctaactgtatcatcctggcaagttattgtaacattctgcctattgaatcttgcctttcttttatattttggtattttgatcatcatgaatttattaggattaattttggttttttaaaggattacattaaaatattattaatcttgattactgaggtttttgacattctctcaaattttttacccaaagcaagtgaggtagtggcctgtgtttcagttgtctcatctataagggaaagttaaaaatagtggctgggtgtggtggctcacacctgtaatcccagcactttgggaggccaaggtgggtagatcatgaggtcaggagttcaagaccagcctgaccaacaaggtgaaaccccatctctactaaaaatacaaaaaatttgctgtgtgtggtggcacacacctgcaatcctagctaatcaggaggctgaggcaggagaatcacttgaacctgggaggcagaggttgtagtgagccaagatcgcatcactgcactccagctctggacaacagagcaagactccgtctcaataaataaataaataaataaataaataaataaataaatatgataaaacaaaaatagtaacgatgtcactggattgtcacaaggaataaagatggtaatatacttacagtgtttaaaacaacactttgcaaaatatgtgagctctcactatgattttctttgactctgcaaatctgttcttcctacattagagaaggaggactactttaacaaagcttctcaaactgaactttaacaaagaattacctagagagcttgttaaaaatagattcctggaccctgctcccagaaatcctgattcagtaggtctcgggtggggcctgagaatttgcatttctaacaagctcccaggtgcggtagctactctggggacaaaacttttgagcagtctgcaacacagaaaatgcaactggagggctccctatcaaatcttggattgatttgctaccagcacatacacttactccaaataatagctgctcctaccaacctcctctcagacattatccaggttcaatttgagaaatagaatcagttgccagttgcctctgcagcttttatctgcatatcatagtcttccctttagaacttgtaggctgtcttatcagtgcttatcctgactttgtaaatgaatacttagaataacattgcagaagtgaataagaccacccaacaacaaagtattttcagtattggttggtaaagaggcccagtatctcagttcagttcagttcaacaaactctcagaggtagcaggcactgtgaataaaaagatggaaggacccaggatattcacccagagtgcacagtcctttgagggagagggacacatgaacattaacttacgattcaggatgtgacaagatagtaacgtgcagagagtgccatggaggagcagaaagggcaccttaacctatcctaaaggtgccaggtaagatgtcctggaggaagcattaggtgaagtgactcttctccacatctgagggttactgccagcagcctgtgaagccccagtagctgtaacactccggcctcttggctcctgattcactgtgccagacgtgtgctgggtcctgatcctccccgttctcccagggagtgcctgctggcagggagcagtgctctgctattccacgcggtaagtctcatcaagcaggccctcctagatgcctatgactgggtaaataagtctgcctaattggggacttcacttgccaagctccatcttccaccttagtccttttttaaaatgaagaacagcgaagtttcttaattcatttggaattcaggtgggaaaaagaaatgctctacattgggctcccttccaaacttcaagaaaggatagtatccaagctgggccagaaagggtgaagagaatgcatcagatgatgatgagattcccataaaggaagtggtcctgggaatgctgacagggctgagaaatatttagttccaccctgccttcttgctgatcacattccttgaaatggtcctttaaagcagggtcaggttttctatgatgagaccttgtacatttctctgagccctattttcctctaaacaatactacccacctcatgggcgctgtaacaattcaaatatatatatatatatatatatatatatatatatatatatatgaggaaagtctctggctacctagaacaccctggtccaatgtttagctgttattctccaggttgcaaaggacagtgctttgtttctactaagttgctcagtgatgaatgcttactggaagcctagtcacttcttcagagcaagggaaagagaaagaactgtccctgccccgcccctcctgctctccttgaatgtgtacattccagaagcaaaggcccaacaagctaactcatggtctaaacatttctagctatgctgctgggcaaaatgattacagcctgaataatggctgtcgcctgatgtgtgtctgggacgtaactgcaatgtggcctctgtggattgggaaccatcaagtattacaagaggaaacataaaagaaaacacagcacataaacaagctcccaggatcactgacataacaagcttctttacttcactacgtaaaacccacagaggaaaagtgttgtgctgaccgccccccactggttcctatttccagctcatggaagaattggccctctgcctgtctgcagacaggaaatgctcctggtttgctaacatgcttcgcctccgtaacccagggcttccatctgtccacatggtcagactctctcccccaaccacacagaggagcctgttttcttctgaccccttctgctctcatcttctcctcaaccccctgcaaggactggagatggctcatgctggccctgtgcccaggcagcctcctcctcctcctccgcccctcacacaccagaggttcatgaaattagtcacttggactttccatggtttcgctgaaggtcacttgctttaactgtcagccagggaagaggcatctctgcggggagttgcagggctgtggtctccctccttgagagggaggctaactctcattgttgggatggctgcccctggatagcacccgtttactgccctccaactagaaggcaagagctccctccaagacactgaggaggaagtcagttccccagtgaccactcatgcttccatccttgacaggataaggcgattgcctaagcctttcatgcttcattttttccaactagaaaaacaaggatacttttcagatcacagaggtaatctgaggacatattaaccaatttctgaaagccaccttaagtttgaccagaggaagtaaagaatggtcatggttcatccagaagtactaagattaaataacaacaacaacaattccatctgttttgttggggaggaaaagcaaattaccagtgaaagcaaacctaggtctctttatacaatgtttcatctctgagatggaactttagtattatgaagcaataaaaacaaaacacagcagaatcctaaactcgatgttcttttggccttgtgtctcacttgcaggggtggtggactcagtaactgcagtggttttaaagtccccagccatgtctcattcaggcagtcaaggcagactcagaaggcaaaagggttcaaattgtttccctggcagtgctgagatg[450 bp omitted]ttacctctccccaccaccattcttgtcagttcactggcaagaataacatgctcatggagtatgcatgaaaatcattagaaataactgataagtatctcttatacaaaatttgacttttgcaagtaaaagggtattttacttatctgtatgtatctatgatctacccatttatctctacatcaatattagatatatctaatccctacacagaatattcagatgattgatagctagatatagatatagataaagcttgtacatgtgggttccaaaagatttccatggccagaaagaatccaaataaaaaggttgggaactatgtatttgctgtttatattgcctttgtgggtaagaacttctgtaaacttgctacctgataatttaagattacattttgttttcttttcctttcattatttttaccctcaaattaccttttccaagcttcaaggggtggtctctaattcttatatccctttccattttaattcagttcaaggagaattatctattgtgtttccagggctgtggttttagtattcaaaagaaatataaatcatatttcctgttctcaaggtattccaagtcctgtggggaaggcaaggctaaacagaaaaagtgtttgagagagtataattcttgctaaaatgaattacatggataataggtgctacaagagtcctatacactccaagatttggtgaaaaatcatagtttatttacagatgaaagagtcctaattctcatagtctgttgacacgtgttggtttccctaacacagtggaccacccagttgtccttctctagctttgttttgttggtcctggggtgaccaggcccacacatagagataggctctgcaagcaatatgctgcccaggttgaccatctgccccagtttccctgtgtggcacaggggaagtccagagtggccttcaaagggcagctcatgaggagctgcaagggagagtctggaactggcatggatctctactcctaaagcctctgagaacttcaagagatagaaaagcttttcctgaaatcacagcagatttcttttgcctgggtggaggctagaactgacaagtcctaatttatatatgaagtctattgtttaatttcacagaggagctgtcaccaggttctagaaagaatggtcaagactgagactaccatgtggagaactactagtctgggcatttgctgcctgaaggccccctagctcttattaaaattattatttacaacaagtattacccaaatgcctgggtaaagatagagtttggtaagaggatgtggataaggcttcatcgtcccagacttacctttcaggaaaggacataaaatctactgtgttaagagaataaaatctttgggagaaatggtaaatggtagaggagaaagtgtgaaaatcccaaaaggtgtgcctttgggcccctctaacaccggagtagagccttctgtttcctattaactagtggggaaagggctgcttctgtttcttatgatacagatttggaaaatatagatttgcaaggaatccctgaagggttagtgaagttaatatgattttcataaagacaagttgtatcagaacttttgtcatagaaacttgagtggaaagaacagcagaaatatgaaaaagaggagaaatcagtggtcagtttttacttagatggcacagtcccttttgaaacttactgccaagcagtaatctttctaaaatgtaaagcttaccaaatggcttgccatccactgttggatgaagtctccacagcagtaagttcaatgcctttaaatcatcagccctaaattacctttccaggcggatttgttgtcagtcccttaccccatctcctgtgaagccaattcagttactaaccgtgcctctaaaccactgattctttttttttttttttttttttttgagacggagtctcgctctgtcacccaggctggagtgcagtggtgcgatctcggctgcgagccgagatcactgcgagctccggcctcccgggttcacgccactctcccgcctcagcctcccgagttgctgggactacaggcgcccgccaccatgcccagctaatttttgtatttttagtagagacggcgtttcaccgtgttagccaggatggtctcgatctcctgacctcgtgatccgcccacctcggcctcccaaagtgctgggattacaggtgtgagcgaccgcgcccggcctaaaccactgattcttaaacttcacggagaatctgaatcacctgtagggctaaagtacagcttacgctgccagccccgtttctccagtagggcctggaaatttgcattgctattaagttcctaggtgaggtgatactgatgctgctggtctgggaaaaaactacaatttaaaaactcctaacccactgcctctactctatatactagttctactttatttagagtaatatcatattccgaatttattatagttattaatagctgcgtgctctgtagtgtttattgccttgaatcaggaaagagtatatgttttaataagttttgtatctctcttgcctgccacagtgcttttcccctatagaaagagattaataagcacttgtatgttaaatcagcaggaaaccaggcagaagagatgtgtcttgtgagcctacaaaaagccctggggtgcttatgtttagatgatctcacagagttatttacatcaaggcacgggggaagagcccctgatcctttattcttcaatgcactcttcaggttgcctcctatttcgtctcttcccttggaaggtattctgaattctcattcgaacctggccgacagaatgggcttccgaatcagaaagctggatttgaacccaactgtgatacttacaaattttatggcctttagcaaataggttgaccgaagtctcagttttccaatttttttttttttttttggagacagagtcttactctgtcacccaggctggagtgcaatggcatgatctcggctccctgtaacctccccttccagggttcaagtgattctcctgcctcagcctcctgagtagctgggattacaggcgcctgccactatgtccagctaatttttctatttttagtacatatggggttttgccatattggccaggctggtctcgaactcctgacctcaggtgatccgcctgcctctgcttcccaaagtgctggaattacaagcgtgagccactgagcccaacccagttttctgatttttaaagtagggactaacactccccaatttaaagattcgttttgaggattcaataaaataaggaatagaatctatgtagccctgtgcttgctacacagtatgtcctcttgcagtatctattattgattataagtgcgcacttgggtgagagcacacagtgtggtttgaaccagagtccccgccctctgcgagtgacccttgtcgaacactttcctattaatcactctgcagggtttgacaaagagttgcaggataactggagaggcactgcacctttccctgaatatcagtgacctcaatttctgccaggggaataaatcttccattttaatataatatctcaagagtcaatgaaaagtaggaatgtcactgaaggaagccactagaaactgcagagctgaggagagtgggaagtgtccctgaggaccgctctctgagaagatgcctctgtactgcaattaggaacatttagaccctgaaacgggaggaatgtggtggggaaggcaagggaattaaatttcctcagcctcccccacacaaatcaatcacaaaggaaataggcatttgagggaaaagttcctttagaatgtatttttctatttgtatgtctattacctcatctcataaatctcattccctgctagtatgactacttgagcagaacagcccggatctttttcagtctcttaataggttcattttttaccctgtaaaacggacagaggaatctcgggatccagcagatggggaagtcgcatgttaagagactggcagggaggtcacttgagattgagaatgggggatgtgcagctgaccctccaactgtcttccagatactggaattatttacttccatgccaaaagaagaatgtgaggcaataaaaacatgatctcagggtctattctatatcttatttaagattgttttgtttcacgttcagcattcctatgtcctgagtttactccacaactatagagttcgtatgcgactccaccgtttgcacagcatcaacatgtccaggaactttccacattttaccttccagatatatctcccagtttgcctcctgtctcccaaatcataaggaactggacgatgagttttggtttaggaaatataatcatggcaatagatgcccttcattttgcagcggaggaaagctggatcttacaacaggttggtgccagtacctgtgggctgaaagctagctcttcaggccctcagcacattactcccttctactataccatgcagccatcatattcattttcagctcttgaaaacatgttttaaattaagaagcatttaaatgctgagaagacatcccagaccccagcctctgtctggttagagacagaagaaaaataaagttaaagggcatgtacataacctcacacatggaagcattctcttaattttactttatcaatctaactttttttttttttttttttttttctgcaatgaacatatccagttctttacatgcagaatcaggtctgactttttttttttttttaattcataagaggctcataaagtcaagtcctggtacctcgacatggtacaaaacaaagcattttattaaaaagctagttagatactcagagatcttccagaccagatctagcgattgctatgctcccggaattgtagtaggttttaggtattagaggttaataaaaagataggctgggcacggtggctcacacctgtaatcctagcactttgggaggctgaggcgggcggatcacctgaggttgggagttggagaccagcctgacccacgtggagaaaccctgtctactaaaaatacgaaattagccgggcatggtggtgcatgccggtaatcccagctactcgggaggctgaggcaggagaatcgcttgaacccgagaggtggaggtttcggtgagccgagattgcgcccttgcactccagcctgggccaaaagagtaaaactccgtctcaaaaaaagaaaaaaaaaaaaggaagttaataaaaagataaagtccctgtcctcatggaacttacagttgagcttaactaccctgaacaagggggtctgaggagggctctttcctaggctgccctagatgcgaaaagcctggagtctggcatagtttgattaaatgaccatccttcccaattagccatgaaaaacactgcttgtgtagctatgtcattatcatttcctgcttggattagtgtaatccatgatatgcaggccttctgtgctccagcatttcctctggggatttgcaacttttgcaaaacccagctttagaatgttggctggagccaagacttcattactcacattactcctatgccaagcaaacttcacgggcttcctttacagtggagtgcacactataaacgttccgtagtttaaagagatgaacagaaatctctttcccaaacccgagactgtctcggcagtttaagtatacacttccctcccttcaagaaaaagttggcagttgccagccccagacaaggtatgtgttcatctctcattccctgtcaaaaaaaagctggatgctgtagaaatgattcaggccttcagtagagttgatgaggctccttccagttctatcaactcttccagcttttctatttgtctacagtggctatttcctgggagactcccttaggtatgtcaactatcttatacccacaatatcattcttccaatcataagctcttattatcttcacaaacaaaataaccctggagatcaaccagaaatatttcaaatgagaaaactgaagctgagaaagacaaggtacttagacaaggtcacggctaggattagaacccaagtctcctaactgacctatacagctactccatcttctccactaaatagttcctactccagtgacctgtgacatctatctagtctctctctacattttcagcaatgatcatttttatctgtaggttgtccaaacctttggtactgttctggaagggtcctgaataccaaataccacttcgtattgataatattgctgaggtaatatctcaaaatagattttcattgccagagcaggcagaagcccattaaaggatattctatcttctgaagaaatactgagctttctttctctctttctttttttttttttttttgagatggagttttgctcttgttgcccatgcgggagtgcaatggtgtgatctcggctcactgcaacctctgcctcccgggttcaagcgattctcctacctcagcctcctgagtagctgggactacaggtacccatccacgcctggctatttttttttgtttttttttggtatttttagtaaagatggggatttcaccatgttggccaagctggtctcgaactcctgacctcaagttatccacctgcctcagcttccaaaagtgctgtgattataggcatgagccaccgtgcccagccaatactgcgctttcacaaatccaagctgcaggaaacagatgaaagagcattatattgccttctggttatgggtcagtctatctctgtgaatctagtcataaaagcatagaaatcagagctgaaagggacttcagagatcatcttgtcaactctttcagtttaaaggtgaagaaagcaagacccagagaatactaaagatttgcccaaggctacagaactagttacaaggaacctgggcctgtccttttttccctatcacacagtgtagtaacagagtcctatggcacctgatatacccagtgttttttccatcccagtattttaccaataatactgttgctatttaggattctataagaaattcccaagaaagaagaacatgctcttgatcttctttttagagtgatacagattgtgccaaagccccaaactcacctattccatagcaggaggcacaagccaacatacaacaaatccctgaacacaacacagaaaaaagaagaaaaaccaccctatcgtgatctcaaagaaagtagggtcaaagatctgatgggcaccgcggaccatgtaccctttgatgtacaatgcttaagacagatagtgtgtcactttcataagtaaagcaagcacaaaaaatgtcaaattctgcttcaagggcaatgagcctcccaacaggactgattaggggagaaacccacccatcctttctattttcctcttcattgaacttgtgcaatatatttccataaatgtcttagtggccagaactttcaagggcaagaactttccattatataaataatagacaacaattatagaaaacttggaaaatacagaatattatacagaagaaaacgaaagagatctatctaccatctgtagataaattctgttaatttttcaaatatatctcaccactgtttcttctaggcatgcatatgcacaatatttttcagataaattgacctcacatcattatacattgctttgtagtgtgtttttttccctacacgttgcaatttattaagaatatttttttttgcaagtggttcttaaactttagtgagcatcagaatcaccttgaaaggcttgttaaaacacagagtgctgaatcttaatcccagtttccgatgtggtggctttagggcagagatccataatttgcatttctaacaagttttcaggagatatcattgatggtgttggtctggcaaacacactttaagaaccaaagttgtaccttaacgtaatttttttaatggctatattcttttgagcagatgtggcatacaacagacattagggcttttccaatttttcagttataaataatactgtaataaatatttacattttacatatctctgtttttttaaaaaaatggctttattgaggtatatttcacataccataaaaatccaattcgttgtttcttgcacataaattctaaaaagaagaattgctgggtgggtcaaagattacgaatatttttaaggtttttgatacatatcgacaaattgtcctctgaggttatacataattacgctctcacagcagagtaccagagtctcattttctgatttcctgggggcaacccagggtattacaattttaaaaacagcattaccaattttaaaagagaaaaacagtatcacattgtcgcttttatttgtatttctttgacatcaattgaggttgaacatttcccccatatatttatttgacattagtatctatgattttgtaaattgctctgccttaggcaggatatttgtgcaggtatcatgcacagcacaagaccatgaggacacagtcatcttatggacagactaatggacacagagaatatcctttgtacaatatcatttccctacaattctcattgaatgccagcatttctctcgctctctctctctgtttctctctctgcctgtctcttcctctctgtctctctttctctgtctctctctctctgtctgtctctctctctctctctctctctcacacacacacacacacacacacacacacacacacacaccccacattatgaaggactttcaggctgtgggaagccccagggattgcaaaaacatgctagactaaaaactcccaactgaattgagtgagtcagttttctgcaaatagccaactgaatttaaaggataagtgtgatcatgtttgtttagctaattttaaaagaaagtggttattttcgttaagttaaatagttttcttattgtttccttattttcttgttttcttattgtttctgctctgagggtgtgcagactgatagacgttccccttgcacagtggaagttagaagaaagaggacccaaccagacagctgtaattgctgatgtttgaagtttcctaacttgctgccaccgaaggcttaaggtcgaatgtcaatagctaaagcattggtgaagaattctgcattctgaggttcgctggcattcacccagatggggaaggggatgttatgtgtctgtcacaggtgaaggagggctggtgcccaaagcatccaatacaaaggtactgtctgttttaggtttcagcctatctagaactttttagaggagtttcattttcctaaaattcttctgaataaaaacaaggtgactcctctattagaccaccctgatttgaaataacagcatcttgttctgccctactgactgctcacccgctaaaggctacttttcatgaatacattcttagtcctctctcttctccctttatgcacttttcctgagggatgttctctgctcccatggcttcacctccctccctgatgctgatgataccaaacaccatgtccccatttgaaaacttgctgttcattcatcttaataaatgcctgctgggaatttctcttccctggaaggactgacaggtgactgcaacctaacctgtttaaaactgagctctttaactctctccacctcatacttccctttcttggagtccttatttcagttaatgccattgccatttgtgttagaaaataaagtctaatctggacactcgctgctcacttgaatcctgcctctcctgcctcaaacaagtgtctctaatgggtcctccttttctattcctgttggcctgtgcggtagctcagaccttccaaatctcttgctcttactccttcaatcttcctagctggccttcctcctgccagacttccttcacactaatccactttatgccttccacactggcccccagaggtgtcttcccatcagagaaatctgataatgtcactcccctgcctgaggaggctgcccagagaactaatctaaattctttcgcacagagcagaagatctttcactctcagcctcctctttgtccctgctcctcacatcagtcccatcacccctctcccaggcacctttgctcctgtcacatttaatgtcttttgccaaaacaaattatttgtagccatttactcctccaggctgtgtgcatgcttctccctcttacttgtcacaaaatctcctcccgattcttcaataccagctgcaatgaatcatctcattcattaattcactcattcaacatatttattttgagcacctaatatttgtaaaatactgtgctagaagaagctaaagagacagaaatcctgttctcactgagccatatatttttctggaagcctttcttgacaccgttggcagttaataatttcctcctaattctcatagcattctgttcatacattatcatagcaattaacaagcatatgtaatgacctatgtatatgtctgaagtctggattcctgctgagactgtgagctcctgcggttggggctgggagggttgctgcaataaccaagtcttattcctctccagctttgagaagagtatatcatatagtagttaagctcatgggttctggagctgactacctgggttcaaactctgtgccatttacaggctctctaatcttgaaaatttttcttaatctctctgtgctttggtttgctcctccgttgaatgaatataacagtagtaactataaagttgtaaggatcaaaggagttaatttatgaaagcaatcagtatagaatatggtaggtgttctacctttattaattccattatggtgcctagtaatagaaagccttcaataaaagctgactgaattagtagatagatattatttaaatgtaagatctatctatctacctatctaactctagtcaaagaccatatcatctcattcccaggaatgaaaatggtgaggagagatgaagtccaggcagcccagggcagtggctctcaggctttagtgtgctttaaaatctcctaggaaacccattaaattttcatatttctgctccatttctgatttggtaattttggaatagatctcagaacctgcatttctaatgagccccctgtggatggagggttgttggatcacattttgaaaaatactagtccttgagagatctcttagatgcctttcctcattgagggtcccagaatgacacactgtcccctgcacagggactggagaaatcctgctgttcaagatggcatagtgccctgtgaacctcagggtccttccatggaagaacatcagggaggaaatgaagtacataaaattcactatgctgagatcagctacaaacacatgagtcataaagttgtgctggctggtgtggggatttgagaaacgtttctgtgtaatccacttgggttatttcacaagaattggcaacgcagcaatggtatttagggtgcctagtggtgctattcagatttgaactacaccataagtttcatgtaggcttaatttattattattaatctgccataaattgctgatgtgacttttagcaggccactttgcttttctggcctcttctttctacgatgggtgggttaagtttctcttaaccttccaactttgttgttctgactcccatgcagggaattacataccactgacagaaggcctgaacgagttaataacccttcataagagagaatagtttactctgtattaacctcagcttcagtttccaaatgtcaatcaatagcaacacaactggattttttaaagtgaagagagagtgccagctccactgtgcatccttatccagcactcagctgtaacaggaatgaaaaagcacacctgaaacaaagacccattctctttcctcctgctctgcctgcagcaaacctgttccatctagcactttctccaaatgctgcattttcctgctcccaggccctggggatgggcaacccaggaggtgggtgctcgagctcctccttctaaaaaagtcctgctgaggtcatctgtaggaagtaacctggtcacgtcctgggacgcaaattgaaaggcactagcaatagtgagttcatggctggttttctgtaaagccaattcccattcttaacctctatttctgttatgccagcagaatggggtaagaaaagacaaacagaaaagaaagtaaacttttttttttttttgagatggagtctagctctgtcactaggctggaatgcagtggcgtgatctcagctcactgcaacctctacctcccaggttcaagcgattctcctgcctcagcctcctgagtagctgggactacaggtgcgtgccaccatgcccagataatttttgtatttttagtagagacggggtttccccgtgttgcccaggttggtctcaatcttttgacctcgtgatctgcccgtctcggcctcccaaagtattgggattgcaggcgtgggccaccgtgcccgaccagtaaaactttattcttctagtattacctaacatggagcaacatctctggttctgagttattttgctgtacattgtacagagggctccacaacaaaaatgccttctgtttgttggtttcaagaggatacaggttcagagaatgcacagcatcacacggtccctttccactggttcagggcacatcatgtgctacagtgcacctgcccagcatcgtgctcacattctacattccaatgtccacttgggtggtattttccaaccttttcacaaacaagggaatcccagccttttattatttctccctcctctgcccatatcatgggatgaaagatttttcttccaaattgcattaataagtaattaatggaatttaaaaattaatcagacacagataatggctaatccatgcttctcatcttcaccagagtaccagtgtaattatttttatcataccagcgaaaagcacagaaaattggcctctcagtgagtttattcagtcttatcacagatacagtttgctttctgataagctttttagaaaattgaaggtagctcaaagaacctcgattattccttgaacactacattttgacaggaagctaagcaagaagagtgtagattctattccttcacaaagaaggggtagatgtttgatgcgtggattatcaggcagcaaaggacagaagaatgccttggctaatgcatggggctggaagctgtggagagaaaggatgagggagaagggtggcttctgtgtgtagattctacttttttgttttgagatggagtcttgctctgtcgcccaggctggagtgcagtggcgtgatcttggctcactgcaagctccgcctcccgggttcacgccattctcctgcctcagcctcccgagtagctgggactacaggtgaccgccaccacacctgtctaattttttgtatttttagcagagattgggtttcaccatgttagccaggatggtctcgatctcctgacctcaaatgatccgcccgcctcggcctcccaaagtgctgggattacaggcgtgagccaacgtgcctggcctctactttttttttttttaaactactggttgaggaggtgcagactagttgagccctgggttcccacttgtctttcctctctcttacctccacctcttttctttttcatttcctactgtctccaaggtaattgatggtgggaccagaaagaggatggagtaaaaaccattggagggaagagtgaactgggctatcagattgtatgtgagctgagaagaatacacactcttcattgtctgcgattattatctaacggtgatatgtcatcaccttattgcatatgtgttatacctccccaagaccgggcgcgttcttctctgtcttattcccctcgtgtttcaagactccatccagtatgggtaggtgctcctcttctgtgttcaagatattatatttaattattggttcatttttccgaccttcccactccactctgcaatccaatgagggcatctctattcccagggccccagtaaaatgcttgcatgtgattcgtgttcaataaatacatttttaatatattagtgaaaatatgtgtaaatacatgtcagataaaggacagtgttccttctggttgtcaatgcagtcatgggactaatgaaacagaaaacaggtaccacccaaagttaaactccagtgagagaataaacaacacgccaaagttcagtaatgaagagccaaatcagagctggagacagggtgatagtagaaaccaaataatgaatggcagatgccaagggatatgggtccagttaaaggcaacccaggaagcaagcaagggcaaaggaggttgtgcattctttaggggagggaggcgtctgtggaaggcccttgcctgccaccttctccattctcagcagtgtccctcagaagaagcactgctggtgtcacaagggctgggatgctaacccctaaatctgacaactttggtgaaattgctactttgatatcagagaccatgccttccatgtcttgggtattccaacaatattgtcccacagtgccttgtagagagcgacacttgggcaaagccctgattcaactaaaacacaaagcacagtatattctgataaatatggctggaatttttggttcttttgtacacttatgtatccaaaaagtttagacctctgcttatcacatagttggtgctcaataaatattttttgaatgaatacatgaatgcttaaaacctcattgcaggccattctccctgtggtcagaattgagtagtatttctaattaaccctcaacaaggtagcttatggctcatcagcaaagcaaaagtggatactaaatcttaatgcatatggattcatcacttgatgaagtgcatcagagccagactggtggtgttcagagagtctccttctcaggtagcttctttgctcatttctgaagcaatctaagcctgctccttttacaagatttgggtaagttatagcagcaagagaacagcttcttttctcaaattggtttctgttcacgtcctcttacgcgagaaggagggctctgtgcctaatgctacatttcagaatttagagtaagattcagtgtctgcagccatgcatttttgtcctgaaatgttgcccttgaaatcaatgacatgaaaacacaatatgagtagtggaataaatttcatatgaagtagcatatgtgttaaaggcatttacaatcccagagaatgtgagtttacatttcacttgtcctgctacaatgctctatgaatttactcagctggttttaataataattttttaagtggtgggaatatttttctgtgtgtatattatggaatgagagactcttccaacaagaatttaacaccagcagaacacatgtgtacagatggaaaaacatgagtagttctctttcatatgttttccagcctctcgatatgtagaacaccacacactgaatcagagccaaagtgcctttcaaatgggcatgcaccctttttgccagttgccatggatgataagattctacttccttcctaatatcgttctcctccttgcaccccatcatgatcgtttttggcatttacaagccatctcttgccaggttcttgcctatgcaaacatactactcctctttcccttttacagaggggctctgggacccaggggctgtcggggagatgtgtcccagagcacttggacacaagactacagctatcaaccacaaatatcttggaggaaatgtttcaccaccaaaggaagagcctcaaatgtagagtatattttttctctttctaccatgacaggaagcaagaaagaagaaaaagcattctaaacaaaatggttttgtaaataagaaaccagagggaggagctgattttcagtgggacagagttccatctttaacaggttcagtttgaggggcctgggaagtcctggagataaaggcctggagctcagggcagaaatcgggtccatcctggaaagactaagattttcagaaccatccacacagaaatggcaattctgggggaagaaacgggtaggacactaagagctgagactgagctttatgggtcatccacctctaggagggtacaggaagaagtatgaaaggggcagaataactcgtaagaggaagaggaagtacacaagctcattgaatgccatgcaagccacaggagacagaatttcaggaagcaaggaagtggaccctcagcgatggcagaggccacaggggcgtcgagaaggtaaggacagggacttctttgtcttcgtttcttctctcttgtcccccaacatcattatgtactcctcactttctccagctcctgcctcactccaataacattctgattagaactgcttctcctgaaggaggcaaaagatatgtactattgtttttgctcttttatttttcagaagtatggccattttgtcacctgtttctcttcaggacaaggggacagcaggaaacacttgtggcatatcccccatgtgctaaccactgagtggagtaaaacggtgatgaaaacatttaagcagcaatgacttcacaaaaggcggcaacagaatcgtcaaggcagaggagttgatcttgggagcagatggcctgtcctcccatcccagtccttccacatggcatgaggggcaggtcaaattcgcctctcctttccttcataccctagaaggaaaacccttcctggctcagccagttgtcatgaggtcacataagatctaaaggctgcatgaataggaagtcctgttaaggggatgccttgcttttctgtcctggaaggttcttaccaatcgcatatcctctgtgaacactcccccaggacactgccatctatggtgatttccctcatctgaaattctccagccaacatttagacattacctatttcactttattttattttattttgagatggagtattgctctgtctcccgggctcgagtgcaatggcacagtctcgggtcactgcaacctctgcctcctgggttcaagcaattctcctgcctcagcctcctgagtagcttggattacaggcacccgccgccatgcccagctaatttttgtatttttagtagagacggggtttcaccatgttggtcaggctggtctagaactcctgacctcaggtgatccacccgccttggcctcccaaagtgctaggattacaggtgtgaaccccacacccagcctacttatttcactttattacttaagtacccacaagcccaagtgaaacaatctccttgagaagagcaactgtgacatacacttgtgggatacccacaaagcctgaagcatgtgcaattgttaacctgcaataaatgcctcttgtggcacctatgatcattcaaatctcttgccactatttccctctgacagtggatctgttttaagggacatcttcttgtcttggcctttggctagagtaatattcttggagcgcagaaaccctaaggcattgttttataatcgccattcagcatttccgagcactttggaaaacatggtgcgaagcagctccttcttagcatgttacacaagcaacgttaagcaaagcaggaaggggaaaactagagggaaggatggcccaaactcctggggctgacttcttaatctaagccttctaataattaccacaaaggaatatttattttaggagtcttgcatgcaacttcatttcttcctctactgcttattttgtgacccagaaaattttaccatccttgcaagaataaaggagtgtcaggttttcttgcagtagagatgctattcctcatcaagggaaatggaaaccaaattaaactttgttctgcaattttaaaaacatatctcaaatgcaagccaacaaaaatctccctgggtctagttgcattaatttttgtatgatgtgcaaagcaaaccactgtagtagcccctggctgcaaaaacccatagaggtaccacagaccttgtcatacagtctaaaaaatcagaagacgtgggtttaccaccatctttctccactttagcaatatttgtccttagcataacaaggacatggaaagtcagtgtcttaatgcatgtagcaatactttctgaaatctcagttcttttgttttgttttgtttttttttagatggagtgtcaccctgtcatcactcaggatggagtgcagtggcgtgatctcggctcactgcaacctccacctcctgggttcaagcttttctcctgcctcagcctcccaagtagctggaactacaggcacccgccaccatgcctggctattatttatttatttattgtatttttagtacagacggggtttcaccatgttggtcaggctggtcttaaactcctgacctcaaatgatccacccacctctgcctcccaaagtgctgggattacaggcatgagccacagcgcctggccttaaacctcagttctataacttacctattgtgaatgcaaaatataggttgcctctaattcacataacacattggagaataggagcatagggaaaaaaagactcctcaatgtgtatagtgctttattgtttagaatatgcaatcactggaattatctcctttaatccctatatctaccttttgaggtaagtatgaggacccaaattttactcaagaagatgcggttcagagatgctgggtcattagcccaaaatccttgaagaagtcattgtcaaagccagtacttaaagcaaggttaaatctcctgggaaatccacacttatttaaccccacaaagttgtctccatataaaaacttaatatttgttacaatccatctttatggaaagatagatttcaatgtttaactcagaaaactgaataagctgtcaatcactgaatgcttactgtaatatgctagatactatattatgcgatttatatacattattacacttaatcctaaaatgattctgagaaaataattaagtgttttagggagtaaagcaggggactcatcttgaggtaggagagagctaaggtaccctggatctattctgcggtgctgctgatggtcagtaggaaggaccgcttttggatggggcacagagtcttcttgccactctatgaaacccttcaacacagctctggtcctgtgaggggcctatgagaaaatggaaaaggtgagaccaccttttcgaagcctagtcttgttgtaactgaaccatgtctgatgaggaggataggtgttggcagttatggaaatggcatcaagggctcctaattaaggccaccaggtagtgggaaggaagtagctctggttgttgagggctggatgaatgtcaggcactttaatctttccagggtttaaaggggcttggaggagcttcaatgtagtgataccgataggtgtgagatcaaaatcaaagaattttcctgatcggcataccaccaggcagggaaaagaatgactgagcacgctatatgccaagcaccatcctaggcactaaaaatacggagataaaaaggagaacatatttttacctttgtaggacttagggtctaataaggaataaatataccattcatggtcctttttcaggtcaccatgcctggagaggccagagtcacatatgtaaaacagacatgaaaatgtatcaggagaatgtaattttactgaaagtctctccagatatactgctggtttaactcttgattgaaccataaaagtgaagtcacccccaaactgcatggtgttctcaattacttgagttcagctgtcactggcaggaggccctttgaggattatgaatcattacctgtatcatgttattaaatgggaaaaatatgttctaatagaatgtgactgtcaattttcaggggcattacagtcccctgggaactgaactgcatcacaagaggacaggcatgtcaccgggaaagaagcaggcatgcatgtgatatgtacaatcattccttttcacaacatacgtggtaatgaggtaggttttatccaaaatagcataggagtacttgcagacaaccgtccaagtgacaggccactgccaaagttacaaggtatgtcaatgtttaatactaaaaatctgacaatgtggtgggggatgggtttttatttggggctgagtcttccccaggccataaaatacacctagaaatatactctttttcatagaaaagctgcaatcacattcagtctctttctattattttcaaatacctttgtgtctgacctaaacatttgtcctgaaattattagcaactccaagcctacattttgtcaaaaggatttccatgaaagataggataaggcatggggtgtgggagagaagtgagcatttgagagtggaaatatagtttgggaataattaatttcttcatgttggaattcacagacagtggcgtttttgagggaatttttgagggaagtagaaaaaattgaatatctggagaccttagttgtgtgtgtgtgtgtgtgtgtgtgtgtgtgtgtgtgtgtgtttaaataagatcctctacctgggatacaatttaaatcctgatgagatctacaattttgtactctttaacttaaaaaaaaaataaatatcacaattcatataagcgtttctttctgggaatttttctttcttttttttcttttttttttgctgacacagccaggctgagacatcaacacctacaaaaactgtgggaaaacacattaaaagtgattagaaaaacaataaaagacatccgtgggtttgtgcaactctctcagacagttttatgaggaggatcaaagatgtgggcctcgactctgtgataaaccgaggtcggctgccatgatgaggacatggtttcacatgagtgccttgtttttaatgcccgtggagagagagcaggcgcacagcatctgactgagtgaagggccacctctctgaaatcacccctgactttgatcaggaggcagagccaggggtggaacaaatatatttgatctgaagagttaaattctccctcagccagctttttaggaatgaccttactgtgcactaggtcaccagccacagagaaacatcagttcctccctggcatatgtcaggaaatggctgcaggagtgattgcctctgagggggaaaagggagctgtacaaccaatcgcctaaaactaccaacaccacatggaatcaggggatgtcacaaaagccagctttaatcaagcttgattgtggaaaacataaaaacatacgcagctgcagcacaatatcttattaatcgtcaccagtgttccaagaggtaggtgttaattgtctcttgtgcttctctgggtatgtctggtagccggttttgctgttaacttgaacacggattagatgtgaggaagaacaaaaggatcaggaggatttctaggcaacacaatctcttataaaatggcatggctattgggggaagaagataatgctttgcagaattctaattttgaccctcttctgaaaaaggaatccaattttaataatcattgcccgatgaaatggtcacccttgcagtgctgcaggctgtacacgtgcctgaatttgattagacggcatcccgagaaagggttcatctgcttttgtctctgggtgattacgtctgtgcaagtgtctgtcaagtctgaattattctgcctcacattatatttctgcccagcaacatagtgctgcatgttgtgacaatgaccttaccttccaaacacctttcaaacaaaatgtctggttcaccccggctcattataactagatatgccaactgttatccttcaatctgaaaagagagaaatagttcagatgtccaaaaggaaggatatgaatagatgttacagaagccagagaatggagaaaatacacaggatcaagtaacaatatcaaagagaaaaatatgacttcgaggtccacagccttctcttttttgttctttaccttccagtccttccttatttctttaaccccctcctcccaaactcttaatgatgtcaagatttctgtttcttccctctcaaacctacatataggaaagaatgtaagatgaaaaatgggatcagatggccgagacttaagtccaggctgcttccctaatcagcttgggactctgcaaaagtcaggatcctgctccaggtctctgaaggttagatgatatttcagactcttctggccacaaaacaaaaataaaaaacaaaaagccagcaaccatcactcctacttcaagccattttagtatatgtggtctaggagggacctgggaagccaccaaggtccaagatgctgctttcccctccaactctctttcactctttcatgccactctcaggacatctgtgtttcccttgatgctccattctcctttcactgccaacttgtcagtttctcagagaagagccaccttggttcaggtaccaatccatggttcagccagtggccaccttggccaactaggagctgacattgctttctagccacaagggctccagacaggaccatcaatcagaaaaggatagtagggaaaagcaggtactataaccatagtggtttcaaaatctattctcaaggtccattcgaaactaagaaaccatgactttgagaaataaggttttggatccccttctggagtaatactgaagaatgcagaattgcctaagaaggtcatagctgaagacctagtgtgggcagtagtgataccaaagaagccaaaaaaaaggctgctgtaagtttgtgatggatggtgtttttctaaaggaccacagcaatacctccatttcataggctcttctggcgatgtgattttgacactcctccccctgagaggtgggtctacgttccctcctctcgaatcagagccagaatgtgtgacttctctgaccaacaaaatagagtggcagtaatgctctgtgacttccaaggctaggttataaaaaggatacagtttccacttggctctctttttcaggatgcttatgctgggaatccagccactatgttgtgaagaagcctgggtcacagagagagactacatgtaggtgttctggctgactgctcaagttaagatctcagccaacagccagcagcaaccactaaacatgtgagtgagagaaccttcatatgactccagtcccttggtctgtaagctgctccatcagaagccaaagggagccaatctggactgactcctgctcaaattataggctcaagggcaaaacagatgttgtcattgcttgaaaccagtaggttttggggcaatttgttatgcagttataggaactggtaccttcatgtgtgtccgtgtgaagagaccaccaaacaggctttgtgtgagcaataaagctgtttatttcacctgggtacaggcgggctgagtccgaaaagagtcagcgaagggagataagggtggggccgttttataggatttgtataggtaaaggaaaattacagtcaaagggggtttgttctctggcgggtaggagtgggggtcacaaggtgctcagtgggcaggagtgggggtcgcaaggtgctcagtgggggtgctttctgagccaggatgagccaggaaaaggactttcacaaggtaatgtcatcagttaaggcaaggaccggccatttacacttcttttgtggtgtaatatcatcagttaaggtggggcagggcatattcacttcttttgtgattcttcagttacttcaggccactgggcgtatacgtgcaagtcacaggggatgtgatggcttggtttgggctcagaggcctgacagtacctccactatgttacaaatttcacctaagaagaaggcagacacacctccagaaaaagtacaagtctagtggttaaatactggtgaccctataaggcaggagctgcttagctactacttgtcttatctctgcaatgcttcatgagaggataattgggagttggctctccagatcgagactatttttttctccttcacaataacttaaaatctctgcctttcttttgaacctatgcaaacatcagcagtatactttgtgcaactatattaataaccaaaaaactttctattaataggaaaatcttcctttactttcttttctccttgccctcccacccccttcaagtctttacaacgttgagaataagctcctaagatgcaaaaaaattacagcttttggccaagtgtcaaggagagctgacatcatatagaagaatggtcattaatagtcaacactcatccatagtggcctcacacactgggcaatgaatgctgatggccatcagtgaccatcatatcccaaactgaaaagatactgagtatcttttctactgatactgaagatactgagtatgcttcactaaagcaatagaacgctttagtgaaatgcacgatcactgatcaattcttttctacatttgtcctcagccatttttttctttatataatatcacaaccactatctaattcagcgaaaatcttcccttttattgtaaatttcctaaactcagttttatgtctcatcttggctcccttaaatgttagaattactttttcatttgcagtaggtatgaggaaaaaagacaaactaattttcaaaagacgtggtggaaaatggattgtaaattcaaagacctgagctttagtcctactcctttgctgaagtttcttgtgtgattctctgcgtgcctccgttttaatttctataaaattgaatataaggtctgccttacctgcctcccaggttttggtttgtttgctttgttaaataggtataaaagcactttggaaaatgtaatgttctacaaatatcgaaacaatgggtctgaggataaaaacaaccaactatatgaaattttaggtactcctagtccagagccttacgcattcaacaaatatctatttagggcttactgtgtatcaggcagatcgctaggcacttgcctatgtaccaacaggtttcatgtcttccctggtttccttccccacaaattgacctctcatctgattgacatgatttccctcatcatagaattaaactacaaaagcagggtattgctactagatgtagaattaaagcacaaaggcagggtattgctactagaagcaggttaaattcaacaaacattagctaagcacagactggctagtgttttcattaacaatattttatttaatccccataataatgccatcatgtgtatgtccttattactgttttatagatgagaaagtttaagatcaaagtagttaagtagcttgcacaagtccacacagctagtaagagggcatacctgagattcaaactcaggtctcactctaagcaaattgttcttttcatttcaacatgctccttgtcaagatgtttgctctcgctggagaaggaatgggatggagatctccttaccatccactagaggaacagagtttttttttgttgtcgctatcatacccgttaattatgatgtagcaatagaaaacttttggaagctcttcttcttggacatcctttcttttctttttttttttttttttttgagacagagtcttgctctgtcaccaggctggagtgcagtggcatgatctcagctcactgcaacctctgcctcccaggttcaagtgattctcctgcctcagcctcccaagtagctgggactacaggcgtgtaccacgacgcctggctaattttttgtatttttagtagagacagggttacatcatgttggccaggctggttttgaactcctcacctcaagtgatccacccgcctcggcctcccaacgcgctgggattacaggcacgagtcactgcacctggccttgaacatcatgtctatacatgttctatattcagcatatttgcttatattttccaaagtcatgaattttagattttttatttcttttttcttcctctctttctctcttccttcctccttcccttcctccgttcctcccccccccccctttcttttgagacaagggttctctctctgttgccagggctggagtacagtggcacaatcacagctcactgcagccttgacctcctgggcacaagtaatccctctcacctcagcctcctgataactgggaccacaggcacatgccaccacacccagctagatttttttttttttcaaatctttgtagcaacagggggatctccctgtgttgcccagactggtctcaaactcctgagctcaaatgatcctcccgcctcagcctcccaaagtgctaggattataagcataagccaccacacccagcccatttcttttattattactttatgtttcagagcagtcttaggtttactgcaaaattgtgaagaaattacagagttccacatactcccaactttgcatttttacatgactgtttttctctatttctataacctaataagcatgcttttcctaccttcctactgaactttttactaatatattatctaattgaaatgagcatacccagtacatttactagaattagatgtgggactcagaaataaatctgcaggtttgttttggaccaactatggaaaagctacctcaaatatgtggaggccaaaagtttgcatttgcactctactgaacagggagagattatgcactcagttctgtcctttgaggatggtactcccgggcagcactacatctcttgtcactgggtcaggccaagcaaagccctaaaaagcaacattagaaaaaaacgcataaagctgggcacggcggctcacgcctgtaatcccagcactttgggatgctgaggtgggcagatcacgaggtcaggagttcgagaccagcctgaccatcatggtgaaaccctgtctctactaaaaacgtaaaaattagtgggcgtggtggcacatacctgtaatcccagctactcaggaggctgaggcaggagaatcacttgaacccaggaggcagaagtttcagtgagccgagatcatgccactgcactccagcctgggtgacagagcgagactccatctcaaataaataaataaataaataaataaataaataaataaaaataatgcatgaacaatggtaaaggtggcgatttcaaccctttataattcagagcctatggattattcaaattccaaatggaatgcaagcaactctgaatatagtcattttactttttttttttttttttgagatgagtctcactctgtttcccaggctggagtgcggtggcgctgtctgggctcactgctagctccgcctcccaggttcacgccattctcctgcctcagcctctcgaggagctgggactacaggcgcccaccgccacacctgtctaattttttgtattcttagtagagacggggtttcaccgtgttagccaggatgttctcgacctcctgacctcgtgatccaaaagtgagacctcggcctcccaaagtgctgggattacaggcgtgagccactgcgcccagcccaaaaaatgttttttaaatttgtctaggattcgctcttgggcactaagtcatttggggagggtttgtgatttttctccctctcagaagaactatcataggaagaaatgaagaaacttaagagttccttcctcatactgtttagattttattcatccaattggcacccaaaatccactacataaagactttgagtgctctgatttaaagaaatctatgagatgtatgagtgagaaatggtccaccgaggctgagctgctctcagtggagctccttatcgtagtgacaaaactcaggacaaaactccatctgtgttacaaccacctcagggacttttggttacacgcagttgtcagaaataacaggactttggtggaactgcctttctagaaaaggagcagtgaagtgttaaaaccagtctgctttctctcagttgcacagctgtgggctgaccaggtgtcacactgtaggtttttctctctttatagcctgtttccaatatgttttcacaggtgctagcataggagggcagtgttttccagggaggctcgaccatgttcatggaggctgagcgctgggtcttccacagaaaacaactgctctcaaggaaattactcatgactggaggattgttcatgcctgttacccagccttgtccacacacattgctactagtttggggtctagatgaacatgtgggccgcagactggcatcacctgggaacttgcaagaaatgctgactctcagcctctcccccagacctgctgaatgagaagctgattaagcaagattctcaggtgatttgcatgttactgctcagtgttcctcaaatttgaatgtgcatatggagtccagacttgggctttagaaccttgtgtatgcatcacctcttttgggccctccagtcttctggtctttgtttttatacatttttctcagccttgatagcctgcatctattttaccttgtgccacaatccagatgaggcacagtttaatgtaatatgtatagcatcaatgcgtggtgcacagatccacagcataggtaccaacagaaagcacctttcaaatacagactcccagcccctccccagacctactgggtcagaatctgcattttaacgagacctaggatttatttacaccttacagtttgaggaccccaagtgtatagaacccacaaattctcccattctgatagacagcatagtttactttcttactttaataagctgcatcacatacctgcacactagaggaaattatacagcaataaagcataattaggttttgctcctaaatgaattaaatattagcttttacaaattgcctatcaaatcacaggagaatcaaagtacttttttgagtccctagaaagaacagatacacaaaagtgtactataaaagtgggatgaaggccgggtgcagtggctcacgcctgtaatcccagcactttgggaggccacggtgggcggatcacctgaggtcgggagtttgagatcagcctgaccaacatggagaaaccttgtctctactaaaaatacaaaattagccaagcgtggtggtgcatgcctataatcccagctactcaggaggctgagacaggagaatctcttgaacccgggaggtggaggttgcggtgagctgagattgtgccattgcactccagcctgggcaacaagagtgagaatccgtctcaaaaaaaaatgtgatgaaaagaggggcagatgcaatgataattattttgtgaatgttggctactatgttaagtaactcacatgcattttattttcacaactccactatgtaggaagtagcattatcctcattttacagatgagaaaccgatagagagagcttgaaatcactttctcaaggctacatagtaggtgagtgttagagtggcagtttgaacccaatagcccctggctttagagccgggccccttaacaactattagccagtgtatctcatagagagaagctttttacacagaggctaccatatgcacaaatatcacaagcacagtatgatttggtaaatgatactgaattcaaagacacaagtttcactcattttaaaattgtgactcaaacaaatgtgaatagtgcctagaggcttccttgctactgaactgtggtccattttttgaacattcctggtgccctgagtaatgtacctttaaccttatttgaaattcccagtatcttcagtgggtgtctgaggggtctttcttacctctgtgaatcaagttgtctctgcacattcatttggatactttctccccatcttttttagaagctaagtgtgatagctaaatgagataacatataaaatgtggcacatagcagatgattaataaaagccactgttattccagattgctggttttctcagactttcaaattaactcattacctagatgccaaaagaaatatatttggtattttcttgacacttagtaggtattctagaaatattttattttaaacagatgaatgaataaacaaaagaattgaggtataaacgtagcttcacttaaggaatcactgctgatcctatcccaggttgtcttggaagtaaatgcttgaactcccagcatcatttatccaaagtgagtaagaagttttaaacaggccgggtgcggtggctcacgcctgtaatgccagcactttgggaggccgagggtggtggatcacaaggtcagaagatggagaccatcttggccaacatctctagtaaaaatacaaaaattagctgggcatggtggcatgtgactggaaccccagctactcgggaggctgaggcaggagaatcgcttgaaccagggaggcagaggttgcagtgagccgagatcgtgccactgcactccagcctggcgacagagtgaaactctgtctcaaaaaaaaaaaaaaagttttaaataactgtcgtgtttaggaatgtccacctattactgttcttctcctctgctctgatatttttcactccagtctatggactaagcactccagaagaggtgtctgcttctgactccagcactgtgcatactgattcattcggctggcatttggcctggccttcatgtggcagaggtatctttggcctatggttaaatggagttgtccctctgatgtttctgacttggcaatgaaatctcagtaaccagaatcatcactacagcaccctgctatttaatctttgctggaaagtgatgaaaacagacctcacttgtatgagaactcttaggtttagtgaaagcaatgtgagaagtcgccaagtttgtgctttgaaacaagcacatgtttgaaaccttaggtttctttttcttaagctttcccaagttggaagcttataacacagacatgaaagtctgatttaagcagttcctataacctttctaatttcagattttaaaactgcttttgcttgaatagaaaatggaaagccaacacatctctctctacccccatccttccctgaataacctagatacttaagcaatccttcccttccctggggctgtgactgtagagtattattttattgactcataattaagaacttctgatgagaaaaccagtcaacagagaaaaatggcttgggggtcccacaagcaaagagaaagcctgtatgtccctattatggcaagtacaacaggcaggaatgaggagatcttacaaaagaaaatctttttgaaaacgttaagtcctttaaaaaatgaactttatgtcctttttgaggaagtcagtttttttttttcctttcccataatgtaatgaaaacgtgagtggtagtttgagctgctgtaagattcagggagtgtatgagagagtgaaattgtgtgtgggaggggactgacaatggaaagttggtggtgaacacagagtgtgggcagaaggaaaaaagcacatgtgaaacatctctgaaaggaagtgtcacaggaaaaacttttgaggcagcattctatggggctggtcagagcaccaccaaagctgctgtgcatttgttcaacattaaaaaaaaaattctgctaaacaaataagcaaaagatttcaaatgtccaaagagccactgaggagaaaccattactcttttaactgaacaaatattcctggaattcagtcacatcttattagtaaagagaagcttctagctcaatgctagaaactgttttgtttttttttttctatatctggttccactcatggaaatgaccacctctgcacccattattcaccggccatatctagtttaatacaagaggtgatttgcctcttggtgccttgaggtatgatttgatgagagtttggtaatgcatataaaatggatttccattatccaattatagccaataggacctaatctgacttctctgaacaattttttaaacaagtagccattttgtatggcacaagtttcgtgcttataatttacttcctaggaaatctttatgtattaatgtagtgtttttacataccaatagttactcctagaagagaatagacttttaagactcatttaaagtggatgctttgaattctccatttgaaatacctgaaataagcttaaacactattgcgggatagactagaaagaaaagtagtctcttaccactatgactaatttcaggtaactgaaaatctacagctttgaaactgcagcactactagttaatttgcaacagcaaatctgtttttcttctgacagatttactcattcatgtcatgtttcattatattcattctgtggacatacaacataagctattagaatgtgaaatctacttgctactttgtttgttgggcattttgttttggttgtttagatctgattgtaggtgtccttgctgaaatattcaggaacatctgtgggaagctaattcttcattcagaaaagaatccatcacaagaggaaatagctttaaaaactggaactgggatacttatatttttattcagttggcttaatttattattctaaaatattgaagaggactaaaagaatttttcttctaaagttcagagccaaagaatctaggattgtatatggctgaagttaaaagtaggtgtcactagatgacacaaagataaaaaaaatcttaattcctatttttttactccctttttcaaggaatgatttcacactgaaaatttgttaagaggaaactttaaaagccaacatggatgaagacatgttaatagagcactgaatttttagttttagtgatgaacatggagtctgcaatatcctagtatacaaaatgtggacatttgatgtgaggtgaggtttttggggagagattgatggtggatatacatgtgttaggcactgatccagacttcttaggcattacctcatttaatccacccaacagccctagaaaggaagtactgttgcagatgaggggatctgttcatgagaaagtttaatgaacttgtcccagggaaggttaatgaggggaagaatgaaattttgaaatcaaggtttactggcccacagaatccatgatgttactagccacctcttttagatggatttgtaatgagttatacatccatatctacagccaatccatgaaagaatgacaaaccacaggtcacttatggtaaggcagggagctgatgtctcccagtcttacagaagactttgtgttgatgacttagtgaaatttatgaacgcatgcagaataaatttatcaattacctggaactggggccaataaaaatatttggggtaacaatcaggatagaaatgatctcaacaaactgaaactatgagccagccctaaagagatgacatttaacggggataaatgtaaatccctcttcatggacataaaatatcagttgtacaaaatgagcagaattggagagaagtgatctagcagggggtctcatgtgtaaaaacatttaatgtaactcaagttatcaaatttttactgagggcctattgtgaaagagacaatggggtacagggagttttagctgacagtaatttcaatactagtcaatcaatgtagctgccaaaacaattaatgtaatctgaggttgcatttataaggttagtctttctctaatctcttcttgtcacaccatattggcaacatagcattcagttttgtgtacccccttttagaaggaggattgccaaactgatacctgttcagaggaaataccaggctatagatgcagaaagagtctaaactactattatgtaagaaagatgcaaagaagtgaggatttttaggtagtagaggagtcatcaaaggggaagcataagaatggaactaggccgggcgcagtggctcacgactgtaatcccagcactttgggaggctgaagcgggtggatcacaaggtcaagagattgagacaatcctgaccaacacggtgaaaccccatctctactaaaaatacaaaaattagctgggtgtggtggcgcatgcctgtagtcccagctactcaggaggctgaggcagaagaatcgcttgaactcgggagacagagcttgcaagtgagccgagaccacaccactgcactccagcctgggcgacagagcgagaatccgtctcaaaaaaataacaataataaaaaaaaaaagggccgggagcggtggctcagcccgtaatcccagcactttgggaggctgaggtggctggatcacgaggtcaagagatggagaccatccttgctaacacggtgaaacctcgtctactaaaaatataaaaaattagccgggcatggtggcgggcgccggtagtctcagctactcgggaagctgaggcaggagaaaggcgtgatcccaggaggcggagcttgcagtgagccgagatcacaccactacactccagcctggcaacagagcgaaactctgtctcaaaaaaaaaaaaaaaaccacaaaagaatggaattagttgaaattctactatgtgaaaggaggttcagctaactggatgtagacccaagttcttgtctaggaccaacacatggagttgtaagagaagagactcaggaaatggatcatcatgtgagttctgtcagtgacagtgttgaaatccagctggaaggccactggattgggctgttctggcaggaattcccgcaatgaacgctttccaactgggtagtatacaaggtattttcccacaaatcctaactatgtgaaggttacacgtctgcagtttcccatctcatggataagcagagtctaaaggaggaaagtagaggctttgaagtcaagtgagggtgagctttctgcaaagccgagggtcgaggctggctggaaaacagggctgggaacctggggcactaaaacatggtgggttggatgggcagttagggaatcatgtggtttctgggaagaatgcgatttgctctcacttttgagaaaaggtgcatgcaacacttgctagctctccaagaccaagttcttagaattcccagctgtgatccttcataacaaggaacgtcactgtgacaggtctgtttccctaaattgtgtcccaggaagaaggagcccatcaggtgcagaatgctaggtcaggagttaatatcactgggacacagatttcttaaatgtacaaagacttccaaggatgcttccaatcataagaatctatgattctaagaaaaatggaggtgatctatgatgaggaattttgatattttataatcatgtccctgtcttccatcttaagtcttgctagcacagtcaaactgtttgaagataattgttttcaaaagatcaggaagaaatttgtctatatgctagcattccttggaatgacgccttctaactactctcagtcttcaaattatctggaggcagaataagactgccttccagtcttattaagggcaggccggttatctatacttaggatgccctatctttgggacatatgccagcatgaatgatcaactgcaactagacattgcctagtgaccgtgaatcatggagatttacctggtttgcttcgtgcaagctatctgacactgcctttgtgtgcagcagaattgaactattttaaaatcaaaattctggtggagcgtatgccttaaaataatttattagactgtgaactctaggaatcacattgtgggtgtacgattaatacccaaataagtggttcaggaaacattttattcattctctggctcttgccatcttccactgattaaagtatggtgttggggccgggtgcggtggctcaggcctataatcccagcactttgggaggctgaggtgggcggatcacaaggtcaggagtttgagacaagcctgaccaatatggtgaaaccccatctctactaaaaatacaaaaattagctgggcatagtggtgggtgcccctgtaatcccagctactcaggaggctgagacaggagaatcatttgaacccgggaggcggaggttgcagtgagttgaggtcatgccattgcactccagcctgggcgacagggcgagactccatttcaacaacaacaaaaaaaaatgtgtctggggaatagaaattgtgtggcattgtgtttccacagctagaaagacactatcagtttgatcagtttgcaatctctacttggcagaacactacgttaaagatatgctgatagattttagtgagctatcctatctgtataacatctttagctccagaaataagaagacacagtaataaaacagtgaattctgtgtgattcaaaaagacaaattgtattttctggaacatatgcaaatcagcaatatatttaccaatttcaaatgaagtgctctcccgtgtaacaaaaaaaaaggaattttttctttgaagagcaagatgctttatttttctttagtttttatcctttttcttatgaaatgcaagaaacacatatttgacttatccatttactttagccaaacagtctccttatttttaaatgtctgtgtatactactttgacctgcatcttaagaaacatatcaaaagtagctgacaaattctaccaccatatggttcatttctcttttctttgttcctttttacttctcactgtagcagtgtctgcagaggggagagtgcccagagtggagaggatcccaatctcctactatcaagatccaagcatcctttttatgtccttcttactgtttgtctaagtggaactcaatgagacaaagcataggcctatccgtcaaatggtaaacgatctagaactggcctcaaaataagaaacaaaaaattatagttgcagaaataaaagaaaggccgagactctaatagctggccaggtggtcagttcaatacattcatgcaaacaaatggtcaattgaactggaggctggggtgggcagtctggggagtgggaagtggtgattaactagacaggtcgggctattcaattaatgggtcacttcagtcccagtgtctgaactggcaatactgtgtatacatagttgaagcttacatatgaataaagtaaaggtgagtgtttagagaactctccagataatttggaaaaggaagtagctaggggctcaaattttgtagagtgactctctcctctgtttgaatctgctagataatttcctgtttcattttgtctgagcaaaaaacaagcctcctttatgcaaaacagtttactgcagggaaagaataaatttgttggattaaataatttattctctttagtttacaacctgagttggatgagataaaatctagaaaatctacaagcaaaataaccacattttgaaatgttgccttcttttgttcacaggagctaaatgtgcctcttctttattagccaaaggcacaagaactaaatacaaaattccttggggaaaaatgttgctatagggctgagtccactggctcctttccctttctttattctcaggaagaaaaggcaccaccgaagggaaagcattaaaatccttctgaggttcaattcatgatccctccctgcccctcaacctctccagcttctctgacatttaaaggaacactgtcaaataggtgaggctttatatttagaatgaaaggcttaaaaattcttaatgacaatagataccattctttgatacatatgcttggaaaacagattaaaaatattcacatcttgaacttgtttttctgactgtgtctatgagggcaaatgaaattagaagagctaagcattttgaacagtatagacatctaagttatataaaccaagtctttctacttcacattttacctcagtcataggctttctttctcctattgacttgacctctgatagaaccacaagtcatcctactgaatattcatgcattcaaattaaaaagaaaagaaaagaaaagaaaaacagtgtcactctctgcaaagccctatgaatctacacattaagccacagtgctctcctagattttacccatgtttacaggaacacctaaattcactgcttgatagtactggggagcttcagtgtggggtaagaatattttcccaagagcacccaaaggggataagtggctgaaggaggaaagctcagaggaagaacttccatcaagaacccagggattgcagagttcttcatccatccagaaaaatacagaggaagacaaatgtgattctttcatcagttcaaaaactcagaaaactaaatataaattctctgtgccttctgggtgtctgtttcaccaagaaaatattgactcaatctctgctacgaaacatacaggcagaaagcagaaaaagagtgaggcatgatatactatgatccaaaagaagcaaggtgaaacttgcaccaggtaaccaactaggacttatacctccatagaatggacgacctgtgtgcatataattgtaaagtcttttagacttggtcaaaaggcaagggccagatctgtttacttgcaaatgggctattagcagtttatgagaaaattatactgtgactaccaaactactatccatgtagcaaaaacgacatgttccaccattttttcctctcgtgctgatttacagtaagtcacaaaagagttaatgttctctctctcccttaatccctaaagcaagtaggttaatagtaccagtgggttgtgtttatagaattgaaacactgttattgtatatgtcaagagaattaaacctctctgattatctatacattttaaaatgtatcatttccttgcatagatacatatctgcaacaaagatgaagaaactgaacatttaaaaaagtaaactaacaattacattgttagagagtaaatgtaagtaaaagtgactattgttaattaatgttttctacacacattattagtgaatgcatgcctttaaaaatcaaaatggaggatacaatgagatcattgttcgtgtgtttccttgcagtgatcaggaagataaatagttcatcccagttgcttcggtgattttcattttaggaaaggtttgtcattttcagtcagcttcagacaaggactcggcttaaaaaacctttttcaaagtgaccactgttttgggctgcatgaacataaaacccctcctcttggggaaatgctatcttgttttcctggatatcgactttctgatgatccgtggatacagaaaaggagacgtgtaaaaaaatcacatgcagggattgaccattgaagtcaatcagaaataatgcaaatgcaaagctgtgtgtcttgcccatttacgggcaataccaggctggagaataccacagtagctctagtgaataacaggggatgccccctccccatgctggtagcaggaggttcactccttaggtctgtattacttctcggctgccccttaaaccctaaacaagaaatcacttctgtctgtaatgtctagggtaaataaggctaagcaaaattataaattaaatgtattttattctctatcttttcagcctgcttagaattcatagtcttttctgtttcaaaccattctttttttgttctccccacctataccttctatagtccaatggttctcccccaaccaccctcggcttttttttttttttttcaataggagccagtacatctctatgtgaatttaaatcacgtgttattattgtggtccttatatttgaggccttttctataaatgtggaatgttaagcatcaggaagcaaatggcagtaggtatttgagggcaggagtttactctgtgcctgtaaaaatcactccaagaaaaggcagagatgggtggcctgcccaggtcactaaggtctgggaggccaaagctactcctgtacaaatgctgcatgtggtgtggtaaagacctgaattgctgccccacttactcagagtcaccattgctttctccagaatagataatgaaaaccaaagaagatttatgtccagagacacattagcaatagtctatagaccaagaagccccttgctcctccttcgacataactaattttgagtaatagaaaataaatctgggtcacttttttgtagctgtaaatccagccttagtaatactgacctccattaacatagctagtatttcaaattccactgtaacagttgctctgactctttgggggctgggaggcaatccaagtagccagagaagcaattgtttcacatgcttcaatcctgccactccagaaaaaatataagggggactagggcaaaagaaaatctcttatttgttttccatttctcatttctcgtatctttattgcttctctctcatccttaacctgtatctcccttcagctgatgcctgattaccttctaccatgttcaacattatgatcagtcacctactatgtgccaggaagtgtgcagtgtgtgaggataccagaccctacctactgggagcttacagtctagctcaacaggcacatcattaaataagcaattgcagcaattatattaagtgctgggccaagggaggtaccagaagtcataagaatccctcctctgaggggatagaagtgaagacttcagaggggaagtaatgattctggatgtgtaggactcagccaggtgaagtgtaaaagtaaggatggaggagagtgttctaaaagagggaacaacataatcaaagttctggacaggagagagatttgacatatttgaggaagtgaaaattttatctagaaacttgcaatgagtaagtaaacaccaggtcaagaggaactgagagattggcagacaatggaaaaccattgaaaaggattaaactgggaagtgatatgttctcttttgcatttaaaaagatcaccaatggggatatggagaatggtctggataggtcttaagactagagccaggaagacatgttagaaggctatcaattgaccctaaagacactgcttcaatccctttgatgacagtgagtttgctttccccagagatagcttattggacctcaggactgctgtgagaaacagaaaatgctcctttacgtgttgcctgaagttaggctcactgatttggggcatgttctaattctaccagctaggaacacacagaatcgcttgtcaaacattctgagtcagatatgtcctccctatgtcttttctgagaaaggcatacagaaattcccagctaaacatcaccagttccctcatttgttcctcagatgatatggtccattcaagttttgtaatcatcatgggggtagatggagggtcccagtcctcacaaccattctggtaatttactcttgaatttactggttcacatgtatctattttgtagtgtggctcctgaaactgaaaaacctaccccaggtattctgtgaacagacagagtagagagtctgtcactgcccacggagagatgattaggcttccgggaaaaggtgagaacactggcaaagttccggaaggaggaacaatatcccttcttcccttcttcatgagtcgtaccatcccttacttttggctggtcacataaccacccaaaataagggctacattttccagccactctagcagctaggggtgacagagtgactaagatttacctggaagtatcgtgtgtgacttctgggaagggtccttaaagagaggggtagtcctggctgggtgcggtggctcacgtctgtaatcccagcactttgggaggccgaggcaggcggatcacaaggtcaggagttcaagaccagcctggccaagatgctgaaaccccatctctaataaaaatacaaaaaaattagccgggcatgctggcgggcgcctgtaatcccagctacttaggaggctgagatggagaattgcttgaacttgggaggcagagtttgcagtgggccaaaatggcgccactgcactccagcctgggcaacagagcaagcctccgtctcaaaaaaaaaaaaaaaaaaaaaaaaaagagaggggtagtccttgttgctgttgctgcaggtattttctccttcttcccagctggaccactagcagccatcttgtccgtgacagggaagccccatgataaggtgggcagaaccgcagaagagacggaacgtggatccctgatactgttaagtgtctccctcctggtttacctactctgggacttcttttacaagagacagaaaaaaaatttatgtattttaacctactattattttgcattttctatcactcacagccaaatgcaaatctgattgatataccttccatgtttcagataattttttttttttttttgagcaagtgatgacacagatgagtatttctttgtccattctgtagaatgtgtcctgggaatgtgtgcgggctatggcggttctattgtttggggaaactctttgtcagtacttctgtctgaggttttaccacgcccctcctattttaggtttccacatccaataaataccgtgatgtacgcagtctcgctaaatctaactctgcttagtcgaaaaggtttctgttgactcatgtgaatatgcatcagaggaaaacagtgacaacattaattggcagaaagccaaacctacccaaaagtttccgcattttctataaatgatgaacaaaataatgaatggaaaagtccctctatattttatcaatttggacgaatgccaaaatgcagatcaatcatttcattaagtacattcaccttctcgctccactgggaagggaatcacttaacagcataaagaaaacattactgaaaattatctctagtgtgataaggagggggagggtggccaggaatcaactcaggtaaattaagaaataaaagtgtgactactttagtatcagaggaatttagttatattattatcacctttggaacacagtaagaaccttagtccgaacagatgaaagattagccacaataaaaatgtaaacatgaccctaattaatgattttgctcacaattagtctctctgtatatactcattaacactcttaatgttctagataactttaacatcccttggtcaggagaagccatggctgagctctgcatggcccagctgcaaaacagatatcatctgtagcttggatttgctgagattccatgtccatttcttgagtcagatctcagagtaaacacaattcttctaacaagctattagtgagacttcattctttttcttctgtttctctttgaggaatgaatggaatctctcctgggacctatcctgtgcctaagagcaaaacaagcacaaaagttcccacatttggtaaactaagagcctgacagatttcatcagagaaagatgtactaagttagtgtgtccctcacagcaaccctcctgcattttaattatttccttcaggtcatggctatgcctcaatccaccatgtcttcctgctgacttctcaggagcttctggactttgacaagttaacatctgtaatagtgcaaagcatgtgtatttggtggagggtggtggggggatacgggtggagaaatgttgaaatagctttaaggatctgactaaaaagggccacttcaggagagggagcaccagaagcaaggcaatcagagggcaatggtaccatctcttaatcacataccatgaaccaagaggtgacaatgagaggggaaaaatagtaaagacaattctatataacaaaaacaaccaggatgataagctttatttctgaatttctttggttttatgttttgaaagcaatatttcataagattacaatgacatttaactcttgggggaaaaaaaagcttctgttttttaataaaaaagaaaaaaaagtctcatttacttaggccacgaaatctgaaatacattgtaagggatcttcatggacagatcagagcaatagatatttaggtagttccatataactacttaccataattacttgaacctacttgatggatagatctataaaacatttctactatgtagactcaaatatttacaaagggaagtgaatctctgggtattcaagaagaaaaggagaaagagtaggagagagtaaggggaggaggaaagggaagaagagaaggatgtttaattgcctaaaaggaccgttccctccccaattataacagcattttgccatgtacaattccatcataggctctgggtgctttagaagtctatttagattaagaaacaattacgcttagtttggagttttgttcaatatgtttcaaattctgagaccactaggactattccacatgaatggcttatatcaaggacctatttgtagacaaaaaagtaaaaggatttgtgaatatatcaaaatgtctatgagtataaaagcttagaccaagtggagtcatatgaagacctaagaaaaggattttaaaagtctcaaatggggcggggtgtggtggctcatgcctgtaatcccagcactttgggaggccaaggcaggcggatcacgaggtcaggagatcgagaccatcctggctaacacggtgaaaccccgtctctactaaaaatacaaaaaattagcccagcgtggtggcgggcacctgtagtcccagctacttgtgaggctgaggcaggagagtggcgtgaacctgggaggtggaggttgcagtgagccaatatcatgccaccacactccagcctgagcgacagagagagactccatctcaaaaaaaaaaagtctctaatggaagtatagtaccatgaaggcctcatgttaatcacacacaggaggaaaaagagtctattttctaccattgtggatgaagtagaaaaaatcatgtaagaattgattatgtttcggccgggcatggtggctcgcgcctgtaatcccagcactttgggaggccgaggcaggcgcatcatgaggtcaggagatcaagactatcctggctaacacggtgaaaccctgtctctactaaaaatacaaaaaaaaaaaaaaaaaaaaaaaattagccgggggtggtggcgggcgcctgtagtcccagctactcaggaggctgaggcaggagaatggtgtgaacccgggaggtggagattgcagcgagccgagatctcaccactgcactccagcctgggtgacagagcaagactccatctcaaaaaaaaaaaaaaaaaattgattatgtttcagcagttttattggagtaaccaagtctacatgaaaggcaaagcatggtcaccagttatggaatcccaggtaggatcaggaatgcgttaggaaagtgctaattgcttcaatataattcttcaaagcctgcaaaaatcagggattaggagaatgaaggttagtaaagcttgctttgggtaaagatgtgatgtgaaagaaaagccatagagataggatccattaagtaactatgctgtgttccagatgaaatttttttttttttttgaaacggattttcgctcttgtcacccaggctggagtgcaatggcacgatcttggctcactgcaacctccacctcccgggttcaagcgattctcctgtccttagcctcccgagtagctgggattacaggcacatgccaccacgcctggctaattttgtatttttggtagagacagggtttcaccacgttggccaggctggtctcgaattgctgacctcaggtgatctatccgcctcggcctcccaaagtgctcagattacaggtatgagccatcacgtctagcctcagatgatattttttacctatagaatgtgagctcccaaaggaaacacctagtaaagttttgaacacagtaacaaggcaataaatatgttgaaaaaaaggaatctaaattgccttttaaaatcatttatgaatgacagcacagcaattgcaaatgtaacatatcaggctacaataatataaccaagcctccatatattcatttaatcaacaaatacctattgaataccttatagatgccaggctgtgttttaggcactgggcattcagacatatgcaaaacagaaaaagttgctgacttcatggtgtttacacatcagtgacaaaggcacagcatatctggacaattacctgaattaatatgtttaacattctctaaagaacagatattttaatgatttttcaaataattgcaccatgaatacaccaattgactaggtatttcacttccttaagaattgctggctctggaaaagaatgcaacaagtcctatcagattatgccttaaaaatgtgcaaaatgtttgttgtcagatctggctgtacatttattaagctgtattcataattaacaaattttatttagtttttttagatataagtcagccggcaagctgctaggagcaagcctttacaaaaaaaagtaaaagaaaaacatagtatcctttctcttgaggcacttatattctaatgcaagaagtcgcaagtcacagagaaatacacttaaacacaaatgaccaaacatgaacatacttactaattcaaatgcaaaatacatatatggtgtagaaacggaaatgaatctgtaacatactttggaatgagtgaatcagtgcaggtcagccatgcatgaaaatatttagcctacccaaggatctatttgttaaatgttttcaaaaaattcagtgcggttattctcaataatatgagtgcaaaaacacattttaaacagaaatctttctcctttctaatctactgtattagtgagtgctctcacaggaaatagatggtgcacttgacttaggataattcatgaaggggttaaggactaattatccaggtgtaaatagggtgtgggggaatctccagggatacagcgggaacccagggctaactacagagatgctgtcagcatccctaggcctgaaggactgagggagggagaggtttctggaactgaggagagagagtcctgtggggcaggctgccttgaaaggaagcatgggccttctgaccagcagggacaaaagggtgtaggtgcacttggaggggcaaatggaagacatgtgacatgcaccacatatactattgcccacccaagttaattaaatagtcattcaatatttattgagcacctactacgcgccaacccctgtactatggaaggacgctaaaagaagagtaggtcattgtgtctgccctcaataattcagagcctagcgtagatgacagacttacaaacagactaagtaatgtgcattgattcaggcaagttctgtaacagaaatttgcaaaagtgttgtgaaaacaaagagggttgagaaagagctatcctttggaaagggacattactagggaattgctgacacacagcctttaccagtaagatcaggttaattgtattcaagataataaagaggtcactgatttatgggcctataattctgatatatttacatagataaaagcatatgcattaagaggtctcaccaaagactccaagagtttttgtttttgtttttttaaaccacaatttatatcagaaatagcgcattgcagtcacattatgttgaaggaatctgcttaagttcatacagccacttagtagcagagagagaggacaaggactcaggtttcctggctttctgccaaggtgaatcttgaaggtgtaacatgttttcgatgtaattttaggtgcacctaaattaaattagttgcctttctcctctcatcattgctctactacatttcatttctctttatccttcattcttattacattgatcggagggcctcttgaaattggcatcagtgaacttcttaagaatcgaaagctcagagtcctatatctgttgcttagcagtaaatttcagtaatgtgtttttcactttactttgtggtagcctgtactttcctggcgtaatttcttttcatataatgtgtgaattttacagtatgatgtcaacatggtgaaatgcataaccatatggttgccacataattgaatgctccagtctgttaattgtgctttgagcaattactgtagtgacctaattgttgccattccttgttttgttagtaacaattattcagtctacttgaatgcagcaaacttaccaatatattcatttactcatttctacaagactgtgagtgaactcccagggaccatccccgggccttaacatgatgcctggtatattgcagatgctctatacttgtttaatcatccaacatgcatttagcatcatgcatttagcatctaatgtctaacacatttcaggcactgcacttggggtacaaatataaatatgacatagtcactgccttcaagaggctcgggctaagtttaattcaattttactgttttttaggcagaccagtactgtgtggtaaaacagcaggcttgtgaagggacaccttcaaacatgataatgagagcagttgtatgattcatgttgcttaaactagagcctatgtagctcacaggctgaattgacttggcaagcaaaataattgctcttgcagtagcccaaatgtcgctgcttctgatgagctgccttctgctcttctaactgatgggactgatggctggaggttgcctggccatcggaacccttttcttttctttcctctcaaaggtcaaagatgtgtcttccttcatccatccctaccttctttgttgctcctttggaaagattcccgtctggcttacagctaatacagttgagcattgaggtttgtttctgcactttgttttcaaactttcaggtgttttgctcatgttgtccatgcaaatttttacacgtttaagaagaaacaaagtttacttttgtgcctaaggaaaaactgatgtctttggtaaaaatgatgccttatatgaactttctggttctaaaagctttcttaatttcagttttgattgactcttttttttttttaattattgagaaggttaagcaatagaagtttttatgtgttatctagaaataattccttgatcttttcaaaatgctttgtgaacatggaaaataagtatagcttatatgttatcaaaaatgagtttctttatgcaacatgaatatttggggtgagtatcagtaatacaagagaaagtaaacaattctgctgaaaagtgtttataattgcagagatattgaaattgccggataggcgggtgcggtggctcatgcctgtaatcccagcactttgggaggccgaggcgggcagatcacgaagtcaggagtttgagaccagcctgaccaacatggtaaaaccctatctctactaaaaatataaaacaaaattagccaggcatggttgtgtacctgtaatcctagccactcaggagcctgaggcaggagaatcgcttgaacccaggaggcggaggttgcagtgagccgagattgtacgactgcactgcagcctgggtgaaagagcgagactccatctcaaaaaaatagaaattgccagaatggctgccagtgagtaaaggttcatcaggaaacccatttcattttgtgcttttcagacctaaagtaaaagagtacagatgttttcttcttttattcttgtctgcaaagtccacacataaagtcaactatgtgagaaaataaaagctgctttggttatggattttggagcagccctgcaactccatattattatttatcaaatactttggaaatttctggaaaaatagaggtatgaaaaggagcaccgggaaaacaaatggttttagaagaatcttttaaaaatatcatgtttggtaaataaaaaacaaaagttatatagaccacgatgaagtgttaccagcataaaaaaggggcagggaaatatcatcgcccaacctcctgcaaaaacgcagtaaatttaaaccataacattctttcaaggtaacttaaggaaagatgttaagtctgcttccctttttgttttcatacaagagatttagtctgccctctataaaaggacttgttttcttgtaactgcaccagttagacttctctattgtaatctggaaatctatggctttggggtcctccaagcatagctttttgttgtgtgctctttctgctgggcaacactgtgctgcaaaggatgtcattttaattattcactggcccatcttttaagcctcttaaaggttatagggcaaattctgtctaaacactcagtaaaagtcaaggtaaggtaccatcttagatccaattccccaaattagttggtaaattgtggtctctttaatgatattgcttcatccttcaatgaagttgattataaacaaattgcagccagcagccaaactcaacacagattatgtgcaactacataactgcctgcctggggcggcctcttttacctatgcacatcttaggtgagactgtgttctggcatgcagggcaataaaacccaggccctctgctgctctgcctgtgagatagtgtggttgcctcaggatatgccaacacagtcaaaagaaaaacagaggtgaaatccactttaccgtatggagtataactgctgtcccttaaaaattgtccaggcagtatatgcatggctgtgagtaaaccagtgatgattacaaaatacaacagatatcacaccaactaatccaagggctctgcatcttgccattatcgaataaagaaggcactttcaaggctttactgtttttaagatctatatcctggcttgtgtaaacatatacggtcatcactaaatagatgcctctctgttacagagccaacaaagaacttttttttaagccctcacttcctctccaggaaatggtgtatattcagagaggaagctgtcttcctgttttctccatactaacacacttgctgggtttttttctaagctcccaaactcagagtctccatcatatggaacaaactcttcttagcaacaggccacattttttgctgcagtgattttaaaaaagatttattttctgtaagtcataaaaagtattattagtctaatttttcatctactgtattctcaagtactatgtcccctcccaaactctatcttattcagcctataataagggcattagactcctccaatggggttattctgtcaaaattcttagcaaaatacatcacctcctagcttcccaattacaaaagcaacttgacagggcacctgctttttattatttcagtgttgtgagatacaaacccagtgtgcctggcacccaagaatgaaatataattcaagaacgttttgtacattctgctctaatgttttagcatttcagcattgatttctgggactattaaaaaagaaccatttggaaacaaacagaagtatttttctttagttgttacagtcacttgaggaactcttgtttcatttatttcatgtagagatacttgaagtaataaagttcaggtaaacctgagaattaaggcagggctaaccctggatgatatattaaatgagatgaattttgagtttgttaacttactagtttattaattctggtaatatgacaaaataaagttctttaacaccccccaaagataacactagttcaccagcaatggatccaaaccaagacaaaatctctgaattgccagaaaaagaactcagaaggtcaattattaagctaatcaaggaggcaccagggaaaggtgaagtccaacttaaagaaattaaaaaaaaatcatacaggatatgaatggaaaaatcttcagtgaaatagacagcataaataaaaaccaataacaacttctggaaatgaaggacacatttagagaaatgtaacttaccagtttgttaacaactcgatgtgtcagttatctgttaagagttttcaaaatgtggtccagaagacctcctgcatcagaatcatcaaagtgcttgttaaaatgcagtttctcagtctccttccagaatgatcaaatcagaatctatgaagtacccctaagaatttgcatttttgtcatcttcccagtttgattacttaagtgtgtgacaaaagacataaggggttagtgctcccagggatatttacttgttcacagagagcaaccaaagacttgaaaactttgaaaacctgtaactttttttgggtggggggtgggggggcagtcttttgggacaagggtaccttcttcacatccctcaaattttataataaaagcagctccatcttcatctacttatgcattggactctagggatcaaatatcaagaaaggctgggtgcagtggctcacgcctgtaatctcagcactttaggaggccgaggtaggtggatcacttgaggtcaggagttcgagaccagactggccaacctggtaaaaacctgtctctactgaggcagaagaatcgcttgaacctgggagacggaggttgcagtgagcggagattggcgccactgcactccagcctgggtgacagagtgaaattccatctctaaaacaaacaaacaaacaaacaaacaaacaaaaaagcaaagtatcaagaaaaaaataattgtattctttattggtatcctgtaacatactgtattgggcagatattctgaagataattaacctgggcattataaaatctgtaggctcctttaattgtaattattttgagtgcatttccactttaacagtgccacgaaactatcgattattttgtaaattaccctccagcaggaaaagaaagaagaaatacagtttaatttcttatatcaagcaatagacctcaatatctcccactatgcatggaatagttaagaatagtttaataatatattagtggtcatttctggaggcatactttacggtgaatgttcaaaattttgatagaaaagcagactttaaaacaaactgaagtggtggatttagacaatcagtagttaacaatacctaacttcaaagattctcagttaattttgcttttcttttgttctcaataatgactacaaaatgtgccttaccattttattttattttatttttattattttttaagacggagtctcactctgtcgcccagtttggagtgagtgcagtggcacaattttggctcactgcaatctccacctcctgagttcaagcgattctcctgcctcagcctctcaaatagctgggattacaggcacccgacaccacgcctggctaatttttgtatttttgtagagatggggtttcaccatgttggccaggctggtctggaactcctgacctcaggtgatctgcccacctcggcctcccaaagtgctgggattacaggcatgagccactgtgcccacctgccttatcattttagatatgtccaaaacacagtttatagaaatttaccaaatgatttatcagttacttactaattagtatagaattgagatacctaaaaggtattcattcatttaatatagaacaacacatcagatctatgttcaaacagctctaaaacttgttaagtcctctgacaagtcaatcactctttctaagaattatttactcatctggaaaacaggagtaacaagaggaactgtgtcaaagagatattggggggattaaattatgcatatgatgtacttagcacagcacctagcatagagcatagagtaagtgcccaataaatgttactataaatattattaatattttcttatctctaagcatagtgttcaacaattaactgcataccatgatacttttataaaaccaatatatagatatattgttcaacttttcacactattttactctatagcatatgtgaatataattgttaattataaattccaaaatttgaaattcctttgtctcttccttttctgtggcttcatatatgcactacttccataaactacatgtgaagctgacatttttctgtccatttattggactacatttagatttatatccttacctatctttggattttatataataatcagaaatttggagtcagattaccttatgtataatggttaacttttaaagaaatttaagtggattaaagttaaataaactttagagaaacctaaaagtcacagaagccttaaaggtacatacatatttttaaaatcctaattttacactgttagcatcttgatgtgatatcaacaccatttatgaagacactctttgttaattagtttatggggtgttaggtgaattattcagtaaatggttatcaaaaatcaaatatttaactataaacattgaatgataaacaatattcctctgatcttaataattgtcgtaagtacattacttcaacaactatttactgaattccttttgagtggaagacattgtccaatgtgatagggtctttgaaattaaaaaaaaaaaaaaagaaaagcctgttatccaatttgatgagctcaaagtctgttgggtgagacagatgtaaaaagatatcataatataaaaataagaatgaaatactgacttgcaggggcccaaggggtagttgtaagagaagggaagatcagaggtatgggggcgtctttgaggatgtcacacatctgatgtcaggcaagtacttgaggaaatgtgacaagtttattgtaaatgaatcacaggggcccacagggtacctagtggagcagatggaaaggggttggagctctaatcctggaaattgctaatatattacaatagtttggattcgtctttaagcactagttgaggatctaacatttttcctaatagaagatcaacaaagataaaattcagttttgaaagttatctgtggcagaatacagagggaagattagatagaatggagagaactaggccacagagaaaagttaggaagctatggtgaaaaaagatgagtgctgaactgacgcaactgtatcagtaaaataggaaagcgatgtgctgggttcaagagatatttcaagataaaataaaaatgatttgaaaactggatagatatggaacttgggcaaggagctgagaatgcttgattaatttaggctataaaaggaagacaaagtgtgtgtgtgtgtgtgtgtgtgtgtgtgtgtgtgtgtgtgtggaagggggactcgtaatctcatttgtggatacaatttttgaagtacctgtgggaaacaggcagagatattcaagaggcaatgagatctggcagttaagtgagaaagttaagttaaagataatggatttaggagccagtgtcagatagatggtaactgaggacacaagagtgtctgcgatcaccgagaagagcaggcagaatcaaagacagacaaggacagatcctaaagaatgtaacacatttaagggtttacccaggaagaggatccagcaaagaaggagcaagtagagcagagagaagcaagaggcaatctggaaggcaaagtaatggcaaaaactgcaatgacttatgcaccaacttaatagtagagaagattttttaggaagcagagattgtcatcatcttatcagtcagcagcagtgggtgagcctcctctcaagagacaaggctgctaacaaggagttaattcactgtcaccaccctttcacaatctctagtagaagtgctagcagaaagaaaatagtcccatgatagagacggcagaagagagaaagaaggaacaagacgtttagataactcataaatgagtcatcagtccataaacaagaaaaagtcagcaatgtgaccattccttctgacataaaggagcaagaagacctctcaattaaaaagaagtcttcctaagaattgaggcaacatggtaatttaagcaacattgaatctctgcaggcaaattgcttggtataactcaaaaattattgatgaatgaacttgggtaagacactctaccagccagggcctcggtttcctcatcttacaattaggaggaatgggtaacataaactctatgagccttttcaactcaagcataccaagagcccatctggtcctcacaagtatcatatgtggtaggaactatttttagcctattttacaggtgaggtgaccaagatacagagagtttagaaaactgacccacacaggaaaagagtagaaaagctaagttttgaatttggggctttctgactacaaagcccatgtgctacaggaccccattggagctcttagaactttcaaagtacttcagcattcttcctattttaaaaatgtgaggctatgagggaatatggataggtattgctacctgcacaacaggtaaagaaactgggaatttacctacaactatacgcccagtaatggagagccctaattcaggtctcctaattctactctactttatgatcttttaaagaccagtaattacattacattaacaaacactaaccttgagaccaaatttaacatcttggaaagaaaccactgttactcttataactgtataaaatatcctttctttctagaaatcatagcatcccatatggaagtaaactatctgagattctgccttaagaagtgtagatggcagtttaagtatagccctctaaaaagtagcagcttttcctacatcatcttactagttaatcttcctgggaacgggctgatatttactcatcccaggagaccactgaattgtctggactccaaaagataccaaggataaggttttaagttccccaccattagtcatcacttggagaaaagtgacagagctctttacagatgcattgccttgtctttgcccttaaaattaacaattttcaatgaatttaaattaggaaaagtcagtaaagagtgccctccctcccttaaaagtggtcggttccctgggtaagatgtgaaatacttggcagtctccagacgacaggatcagataggctaacaatgaatttgagagcttgcaaagaaaagttagacagaatggatcaggttaaagtggacacaaatgcccaactacaaattctaattattttccttcccactcttggaacaaagagacaattgtaaaatatattttgtatgtatatatacacaaatatacatatacatatatacaaatagtgaaagtatctcctattattgatgctcagaatttctatggaatataatatatgtgcagttttaacagttgaataataaaaaatgaatacttccttagaactaggatatagctaatttctaatataggtcttttgaggccatgcctaggttattctggtaaactgatattgtggagaaaacgtttttgagtcacgaaattctggattcaaatcttagcacgtcctcttagagctctgtagatccaagttacgtaacttttcagagcttcagttttcaaaacatctgtaagatggaggaaagaacaccaacttttgggggttcttataaagattaaatgtgataaagaatgtaatctctctagaacctttagttctcatttcctttattgcctcctattcctttggtgatcatgtacaacaaaataggaaacacttgctgatgttggtaaaccatgaactcaactccaaagcaggaggtttaaataaccaagaaaactccaggaactgatgccattattttcctaatgagaagcacttatagtcatgcgaaatacaccacacacttacttctaggtcattggccaacatttttgtcctgagtggcagtgattggctactcacattaccctctgaaagcagctctattttagtagaagttgtcaagtagctgatgtatgctgaaaactatagaaagtcaccctttcctcaagttcttaattgcatccatttgtttaaaaatgccaaaaatgcacatgctctgacctttctgagatttgaactcagatccagtgaggaagtagaggctgaggattaggaaagaaccatgtgtctttggaaattggccatgtgcctcgtctagttgaccttggatacttgagattgggtccagtggttccctcactttctttgcttcacaaattaaaaagatctagcccataagagatgtctgtgtgtccatttcttgcactaggaatatgggaaagctgcttaagaaactgctgcttgcagctcatgaaatcatgagtcatttgtgtagtaaagtgaattggccacttacatttgtacaaagttgaaaagagggtgggctggggaatggggtaattccaactcagaaataaatcatctgagtggactgtatgccccttgaaatgctggggcaggttgctgggttcacagagagcaggtccccagcactgacatccttccaagtaacaaatcttcatcaaggcctcacgacctctttaacaccagcatataacacagaagatttcagatcatagtgtgctctctcttccacttcctgttatttttaattctctgctttgtttcatgtttttaaaagtctttactaacacttctaggggcagcttctgaatgagacagtggccagtaatttctctgacgaatacacattgttgtcccctctttggggctgaggaaatccgaggcaggaaatggtcagtggcttgttcagtgtggtgtagaaaggtagagacagaccgacctcatgagcagttcaccggttaattaagcccactgaaccctgctgccacctggaaatgggtcctgggctcgttcctgcacttcctcctccacacctgcagctgggcagagcccagctgcagccacccccctcgggtgctggctgccactgctttggctggttgttccctctctttaacccatttcttttcactcttggaccttttatccttttcagtcaaatgatagatccaagtccagaaattacagaacaacagattggaacaacaaaggcaatgagaatgtctttctagctttctaaacttaggcccccaaagacttccaaacacatttcaaaaaattattatctaaaagcacaggggaacaagtttaaggctgagacatgtactgcatattttgagacagagttacatactcaatttgcttaaaaaaaaaatagagtatttagtatcatatttgcagagtcacatgtcccagtccacaggaactacacaaactgtgtcttcagaagttggtagttggtaatctcttttaggcatgcttaaaccagaagaagaagatgtaaaattggacacaggaaaaagattctcagtgttgcacagagggaagaaccaggaagatcttagcctactcctcaacctaaaccctccattcatacttggccttttcttttcagtctgtagtttgacttttctgccctaaagtctatggccctgatgaactcccaggaagaggaagccactgctttcttccattttaatgcctctcttaagtcccacctcaaatttcacctttctcataaggctttcctcaattcttcccagagaattttacttcacttctcttgattgcaccaatttttattgttggtaccattaaatttgtagctttacatgtagacattttggaagttttacatgggtatgtctggtcctggtattctatttatccatactgccccagagtgtccaggccatggtgcactccagattacttgtaataaaatgcttatggatcatttaggtatgctgtgtattacagacactctgttctgaaaatgaaaagcagaaagagactcagtccctgttctcaggaagcgtgcagcccattgagagaagaaagcagggaagcaactgattagaagccaacgtaatgtgttttctcacagagggtgtgaattcagggctggagcaacacggtgcaggggcatccaactctgggtaggacactggggagtagaagtcagggtgacttttgaattgagacttgaaaaagcaaaggttcaccaggagacaaagggcaggggtaattccaccaggggcaggaggaggtgcacaagcaaataggtatgtaagaggccatgaagcaaagtattcagagaattaggaatatgactggagaccagggagtgtgagagcaggatggtggggatgtggaatgaagaagcagaccaatatgttcgaattcagtggatgcataagcgcatccaacatactttgctcagtgctcattacatgttacactgctgttcctattaaagtataacaagtatttgcttagctatttcacaattgatcaatttttactagctccatgtcactggaaatatttcccttgatccttgcaaatgcagtgaaggaaagtgagaatgccactcctgtgcatttactaaaagtaactgcacaagcgcaaatgcactgtccatctaaataaccaaaaatataataggacatggtgactgtcactccacggtgctgttgatacagttcacacagcactagatgctgccctgcactgtttccacttatagcgtggtatgtcagtagactctatgagacaccatatttagattccatgcttcaatccagagaacactgtccaccgataatttattcgagcatcttccttgactgtgttatctgtgtttttgctctatggtttcctattttacagacccaacctttaagtccttctctctttttgacagtagaaaagaataagacaggacagagaagcttgtaggagtaggtgaaggtgaataatggttggcaactttctagttgatcatatacctgagaatacattaccctgatggagtgaacgccttttgaaaccacagcttcgttcagatatgttattagtattagattttactatgtagccactgcattaatttagcatcatcgtcttgaccattcatccttaaaagtattaacccagtgtaattcagtacttctttggtaaaccttccataggaagattacgacaattttagtgattatgaactatctaggcttagcagatgctggtaatctatgggaatcatgacctgaaaggatttatgtctaaatgtgatttaaaatccccccttcaagactccaatttacctttcatgctttgcattctctcaaagtacatttctctgcagaatactttttcctactaaatgattccaggcaagcttgatattacataggtaaatacatttgctttctgcgtcgaggtacttgtactaattccaagttgctttgaaaaatgcactagaaaaaacgtttggtgtgccttttgaatttttccacagcagtgtcagtgacagaaggcagctgtaacgcagctgtaaccctggctttgacttggtttaaaggctgatatttgactccaactccaaaaacaatcatcattcttataattcaatcctaaggcaccatgcatcctcggtgaaccccacttaattgtcatctttaataggggcactacttggaaatccagttttcagcatgtctttttttatcctcagcgtacacagcatgaaatgcatttttatcttgatgcagagcaagtgacttacttgggtcaactgactactattttaaggccagaatttcttgaataaataaagtataaaaactcagagatttttatattatttccacaaaattacttttgtgaggtaacttcctgccccattggtctcattttaaaatggagcatattttatgggaatgtataatactgacactttttctttttgttttttagtttatttgaggtcttcacatagaagagtatttatgtatgccaaaaaattcaaatctcaaaattttccctccaattcctgactgggtaggttgccaaataaaatgtaaaagcccagtcaaatttgaatttcagataaataacaaataagtttttaaaagttataagtatgtcccatggaatatttgaaacatacttgtactgaaagataattcattgtttatctgaaattcaaatttaactgagcattttatatttttatttgctaaatctggcaaccctatatctgggggcacttgaattatgatcagaagtacattatctccagattgtaggtctgcaaaattcccaaaggaccattcttttcttgggtatgtgcaaaagtggagactgtcccaccacgccattcccaaaggcccctggggccatccggctccgggtctaatggatctagacagtggagattaaccagtcccttctttaaagtatgttaaaaagctttaaaacaacataaataaggcccttcacatactgggcactcaatgtatttaggttgaaatctttgatgttcattagtgccagtcaagatgaggacagagataaaatatgacatcttagaaaccattcctgtacatgtctcacctttcaatctaagcactttcggattcttcaaaaaccagctataattccaccttgttcaagaggccttcccagatcacctcgggcatgagttctttgccacctcaactctccagcatttatcgtttatacagttcatttgacgtttaacatattttgcttaatatgttaaccatcttttcatttatacattcttttaggaaaaacatagatagtagaagccttgcaccgtgatttacagcatgagcctaggagtcagaccaattttggtttccaatgctgccctgtcctgtctgagctttgtaaccctgaacaaacatcttttctgagtctcagttcattattattattattttgagacagggtctcactctgtcatgtaggctggagtgcagtggcacaagctcggctcactgcaactccaccctcctgggttcaagtggttctcatgcctcagcctcctgagcatttgggattacagatacctgccacgatacccagctaatttttgtatgtttagtagagatggggtttcatcatgttggtcaggctggtctcgaactcctgaccttgtgatctgcccacctcggcctcccaaagtgctgagattacaggtgtgagccaacatactcagccatcagtttattatttttaatccctcagtaaaatgagactatttcatcatgttgtattaaatgagttgatgcatgtatagtgttaactcttgggaaacacaaagacactaaatggtggcatgttgttatcattgccatgatctttatattaatattactatcttcttttaatctcccacagtgtccatgcgttatcaggccctacgtgaattgatcaaaggatctttgcctgagagttgacagaggctccaaattccttgctgtctagagaagggggtgggggaacactgcctgtaaacaaatgagtgaccctccttcactctcttagggtacagatttcattctcttatttctctttctctgtgctcctttaaacctgcagatttaagccactgccttgtgctctgcttgggattatgtgagaagcaggaaaatttcaactgccttagagatttgtttccctagtggcaccggacatggtgagccctcctgggactcagagtcagcacatgcttcctgccttactctttattgactatttgctgcctctttatttttttctaagtcatcagtgaggaagttgcataacttaaaagctaagctaagtgggagtctgtttactgcaatctggagtcatacatattatttatcttctttgcaagttgttacaaaatgcaatgtaaagtgttcttatacatgcagaattttttttgtcatccttgggtatgcatgagcttgagtttttaacattttatttctggttgtattataggtaatagagtaacttggaaaaaagtacaatttccttaacagtcagacatagatttaaaaaaatacaagtttcaaatacatcctctgaaacctctactggatttttcaaaatagcaaattcaaaatcttttatataaaaagtgaaaaaaaaagcatcatcaaactgaaaggaggatgcctttctgggttgttcattcatcaggataatatctgtaaaactctaatctcttggaagactctggctaaaacaaattcatttttggatcagtacccagtgcctttttcataacaggtattcaatgggcatttgttgaaccaactaatgagaaagtatttattcaacaagtatttattgagcactgaggagatgtattactataaaataagttcacagtatatagtgttattaatactatggtcattaattaataataatttcaccaccacaacactgtaatgcagcctccagaaagccagtgacataaactggaagtttgggtgacagagtttacagcttctgattatttagacttaaagcaattagccttgctgttcccactgttaaccacagagaaggacatgttcccaagtttccacctattcacttcttgattaataactttaaagtcattccaaacctatcaagactcagagatagcgctgggcctttcctgtagtgtggggtttgtcttcaggaacaaaatcccacttctgcagcctgcagtgtgacccatctgttttgtatcccctgtcattttgggaacagtgtaacactgtggaggccaggctatacccgaggttagagaccccacctttaaaattattactctggggaaagcaggaaatattgtttcaatcataaggataaaatatggacaactatgaaccacttaagaagtttcatagcagttgccttcaaccacaaaaccaaaatcagtattgagctctttgcttctgcacagtatagggaagatgtgagtggcagttcagtcaagcttttttttttttttttttttttactgttctctggacctgattttgcacttgaaaatttccaagctctcagagtacttcagtgttaatagaaaacagctaaaatgttgccacatttgcagatgtggcagatgtgagcagaagaacaaggtcagcacacataggaccaggtcttggtacagcaggagcatgtggagtttccagaactgctttcaggtgtttctactctgtacggttttcattccctatttccaatacatcatcccctgtgtttcacctcatttcctcccagtttccgtttctactttgtcatatattaatttggacctttgtaatctttggtttccttctagtggaatctggtgattttattaaaaccagaccaacgagaaaatgtttccaggtaagtcttcaggctggcagcctctcttccaatatcatcccggtccatcagctgagcctggtaggtaatcccactgttgcagactggaggcttacaaatgctgctcagggatagcactatgcttgaaacatacgccttgtgctttagaagccatgagttccataagcgcacgctgaatatgtttattaaaggacacgtggtcccatggaatgtggcgctcagcactgcacagcactagcagtcaccctgaacactcactgttgtcagtagcaccatccagactctagtgcagacacctctccatatcccctgctttgtgtcttggaagcccaaggtggcttcttttgaggctggattgtgatgctgcccatatcagagaaggacacttctttagagagcagggaggagttgagcagcagaagcactcagttaagaaaaagacaaattaattaacttgtcaagtctttcctctcagcacgaatgcaagggataatgagatatcatttcccaggagtgccaagcttccattttgctacttcttttcatgttctaattcgatgctccagaagtactcacctattaccttgataaccccaaaagttgcatatcgtggccaaagaacatcttgtaatattaaacaattcctatggcccttaaagttaaatatatgcaggtctagtagtgactagtgtgctagggattctttggtaattggatcaccattgaacactagaattactaccagttttatttttataaaaatatttaatgtgatttaaattttcaaaaaatataatttgtttcatttaaataattatttgaatgttatattcattagttatactttgaattttgccttttttcccagaaaactgaagattttagaagaaaacttttagtagcacaaaagctaacctttagttttggatttttatttttactttacatttttgatgaaaataaattcaaattgtgtgtactttaatattacacttcatttttaatactttagaatctaatatttagatcattactgtcaatagaagacacgttatatgaaaactgtcattataacaacataattagggaattgcagaaatgaaagcaaaaataaattttacagattaagtaataatatattaattatgtatgacctaattttattactcatggaaacatcaccaaccccacaacagaatattcagatgtacacaataatgattacagtcatcatggacattttgttgacttcaagaatgacagctttccatatatttttcaattttgtcattatcaacatttatttgtcaaggtagaaagacaaagcatattttacttaaccatttgttagcctatttataatgtttaatatttagacacatagtatgtaggctttcatttgtcttgccctgagtcctaaaaatgttagagggtagatccagccaggtattttctttttttttctttttttctttgattgtcattttttttaacttttattttaggtttttgtgcaggtttgtattatatataaagtgcatgtcacagagatttgttgtacagataatttcatcaccccagtaataagcatagaactcgataggtatttttttcggatcctctctccgctcccacccgccatacccaggtagtttcctctttctgaggcttatagtagtactgttcttctgaactactgccttaagatgattagtttaggtacaacacaattgggttttttcccaagctatggaatgtactctctcaatttgtagtttgttttacagatagggataaaagtgtaagagacagcagcactgaattatttgatattataatcagtttcccaaagtattttttgacaatctatgtgtatgatttaatatgctcccatattttatgcataagggaaaagagagatacattattttatattatctttggagttagacaaccctagatctgacttgtcattctgccactcactaacagggtgacttatttcaactatttaagcctcagtttctttatcagtaaaatggcacttaaaacacccacacccagaaggtttacagtcagtacaagaaaatacatgtaaattacttagtagatagtaaatataaaataaatagttattagtagtacaatgatccacattttaaaattcctaaagtaccagtctatttatttactcaataaccctccttttcaaacactctgataactctccactgcccaaggtgtgccttgttaccgtattcaaggggctccaatatatccttccaaccttaaattccaacagtgccccaaccccatgactactgtccctggagatctatactttcctacctctatgcctttgctaccacaattctatctatttgaatggctgttcttcttccaaggcccaattcaagttcttccaagatgtcttctcatctttcaatgttaattaactttcttctccttgtgcccccataacacctcctctgtagctctctcacaaaactcaatacagtgagcttcatatcatattaagttttgtgtatgtgtccatcatctctgttatactctcagcttctctgggacagattatatctttgtcacctctgcataagtgtatccccttcccagagcacatgacatagtaattggcacaaagtagatgcacataatgttctttacttgaatttgttgaatctacttcagaggaataaaaagaaaataaaaacaaaattaggtcattatttggattcttcaagtactggtgattcttgttttcatggttacaaggatttttgttttttttcaaaatgacattatttatactttaagacagttagctaatttccaggaaaagcactttgtctaaaagcacttcttattgacaaattgaacattgtgatacattgcactactttagaaaacatgcaattcatgtaaatactctgggggagtttcaatgtttaggtattttagtgttttcaaatctctacaaattctttgctattcctcttttcagaaaaggtgaaaactaccttcttcctgagtgcaggtttgactcagtgaccagcttctaaggaacaaaatagaggggaaggaagtatggtgtgcaactttggaactaggtcataaaagaccatgcagcttaatttttgctttctctctttgatcacttgctatagggaagccagccaccatgtcaggaggacaattaaactgccctacagagaggctcacatgatggtgtcacctgtcaacagcctttggaagcagatcttccatctctattcatgcttcagatgatagccccagcatacagcttgactgctacctcaggagagacctgtaccagaaccacccagctaagttgctctctgattcctgactcttagaaagcatatgtggtaataaatgttaattaattttgaggtaattcattattcagaataataaccatggccaggcatggtggttcacacctgtaatcccagcactttgggaggctgaggtgggtggatcatttgaggtcacaagttcaagaccagcctgagcaacatggtgaaacccggtctctactaaaaaatacaaaaattagctgggcgtggtggcggatacctgtagtcccagctacttgggaggccgaggcaggagactcacttgaatctgggaggcgaaggttgcagtgagccaaaaatgggccactgtaccccaccctgggtgacagagcgagacactatctcaaaaaaaaaaaattagataaccaatacagattgtacagagatcgtacgagcattctcattgtagttattcatagttttaaatctatgatcattaatgtccaaggtagcaaggaaatttgagctggttatcaaaaattgtaatctggaacccacctttagttgatcaccattcattcaattaattacatatttagcaaatacttattgtctcctatcagccaatcactatgctacatcttagaaatacaaagacaaataagatatggtgcatgtttttaaaggctcaatatcctagtgttccccaccacagatagcatggggattgaatctgaggaggctttattgcctaaaaagttatttaagaatgattttatgtcacagggaaagaatttgggtggaattcaagaaaagactctgggccaattacagttttagcaggtaaggtcccaaacaatgccagaccagacaaacagcttcaggctttgaaactaaagacagtggtctcaggttgtgtgacaaatagaattctatgcaatggcctgtctgtctatatagtctctcacacataagagcaatcattgccaataatgccatcctcaggcatgaaggacagtgacattaatgggaagaaaaatattccattagtaaaacatcccctaattaattctaatctgttccctggaaaagctgctctagaggaaagattttttttctccacatgccaaactgccaagcattactttggaaaattttccatttagtttcaaggaatattaaaatgtttcacttagcaaaaattagaaatgaatctatttcctagctcatattatatataaagataagatttttacagacagtgtcaattcttaattgagcatatcagctaaaagcaactaaattctattagtctctgaattgacatttattattattcttattctttactataaaaatgcacttaagtacctaaactgcatgccatcttagaaactgtgatacagcaatgacagatgtagcccttattcccctaaaaactttaaatttgtcagataaaattagcagaaaacaaacaaatcaaaactgcataaaatagaatatcttcacatcaattcattagtgaaacagtaaaaaatgttacgttcaatggaggaatatgaaacacaacaaaagtgacaaaccagtagctacactatgcctcaataagtattcacagaatcagcaacatgtcaagctgtctcctacctcggggcccttgtacctgctagcctttccctacccagcaagttctctctgcttagctatcatgttaatccttcagatctgaaagcatgtgcccctttcttcgggaagttctccttgactccctaaaattatatcaagttttctgactctctaaactttccttaatatcacttattatagttcatagtttccttctaataggtatatacttaccctagtacctacgcataatcctgtagtgatccattccttaatattgcttttcatagttcacagttatacatttatgtgattatttcataaataagtctcattcacagctatactgtaagtttcatgccaagaatgcagggagtggttctctcatcctcctgtttcagcccagtgcctggcacactgtggttgcacaatatatatgtgaataaatgaataaatgagcagtatagtatgtgttcagagcatgagctctgaagttaaacatatttcagtacaaacaccataatctcactatccaattatgtgacttttgacatagtttgctcctctctgagattcattcagttttctcatgggtaaaatggaaataataataatagtagtttccttatatggttgttgtaagtttaaatgagaaaaggcatacaatgtgttttgcttaacacctggcagagaacaagtgtttattgttgttgctgctgttattatttatgtctctgtcgccatcgaatgaaatcattacaaactcggccaggtgcagtggctcatgcccgtaatcccagcattttgggaggccaaggcaagcagatcgcttcagcccagaagtttgagaccggcctggccaacaaagtgagacccctgtctctacaaaaactacaaaaatagtggagcgtggtggtgcacacctgtagtcccagccactcggggggctgaggtggaaggatcacttgaacctgggaggctgagcctggagtgagctgaaacagtgccactgcactccagcctggggggagaaaaagggaacactacaaactcaattctctcatatttttttcttcttgttcaggaaggtgggagagaaagtactgattgagtctatctctgatgagcttctggacagcccagtcttggccacatcgggtttccagacatttttgctgcctggctaactccccatggcatcagctaacttcaatcactccctccagccatcaccaggctggattcttggtttcctattactatctagaggtaaagctctttaatttatcttgcttttctccttcatgctagcacccagttcctaggatatgacactgtgtagagctaggtcagaagagaaatgaagtcacactcaaaaatggttccacttttccaacttccaaacactttccccaagtcaaccatgtacatacaccttgactttcctctcaggatgacttcctgccacaactaatggagtgcctggctaaaaataaacaaataaaataagaagatggccgctgtccaccttccattgggacattttacttttgagaacaaacatttagtcactgaagctgaggaagtcctcattcaaggacagggtttccttgctcagtcggccagaccagaccagacaagcctcatgcgcctgaaggtcctggctcctggaccctcactgtatttataaagtcttaacagagtgactgtgaattccattgtggtgatgctgcctccggctggcagatggccatggtttctagacttcataagcaattttgaggcctgcagatatgggcattgagagcactaggctctcctttacatatctatgttcacgcggtctcttgtaaagttatctttgacatattttaaacttattagttgttttctgaaaatgtggctacttctagttgaacaaaaaaaaaatgctccctagtctctcacctcctgaggcatagctttgtagaacaatctatagaaataaagagcttttaggaagttcagggttgaaacaaagaaaaagaaagttgtttctcagcagaaaaatgcaacaaagcctttcttcttaccaaataacttaagaatgtctgaacaaaaacatcccaaacctggctagtgccagaatttctcagataagtcaagagaggggaaaaacacaaatcacaccccaaaccaccaagagatgaatgaatggcaaaaagaaaacaatacataatttaaaatgttgttaaacatttaaagaagtaaattgtaaccattttctagaacagcaattatacgtaagagtgttttctaattaattttcttctgaaaacaattggtgagatcctgcagagattccctctcttcccccaaggcctttcacacccctggagccccaggaagccctctgaatctccactctctacctacctagaggatcccttaccagatactacctcgtgtgtcatgttgtaaagcatttctcacaatgtggctagtctttctaaccagactgcaagcatcctagatacagaaatataatcacatgatctccccagaagctaccatggtgccttgactacatatcgattgattcatttaagaatttctaaatgttttcttcaaaccaacagagaataaaaatctgaatgagtacttcattgcattataccagtataaaagcagaactggcaataccataaatttgaaattactcacattttgaggaaattgtagactctttgggctgcagagaaatatcattgcttggtgctcactctcacataacattctgtcttgcaaaataccagacagatatcaaaagcaggaaggtgggtgtggatatggaaaacagaaatcaatttgcagtattttggtatcctagaaccagtgaaactttttcttacacagaaaagtactatgtttggtatgcaaatattattattaaacttaacaccagttgttaagttttcagaattgttatcctcaataggataagctgaaaattgaaacagctttaagaaaaaacatttaacgaaacgtgggatgtttaatgaaaaatttcccacaatatgactgtccctggtcccatttttagaaagaaaatcctgagctatttagaatatggaatgatgaatatggatagacctggctagtctagaatagtctaggatagaatatgagtatgatgatgacaacatttgtgcaaaaattttcagtttataaaaatacatcaaaattcattaatacctctttcaaagatttatatgttttgctcattcaaatatttgtatatatctatatatatttgtacatcttgattctcaatttaaatgcattacttcacttactgctcttttaaggatttatacatattcttttttcaatgatttatacacagtgctttttgatgtaggcaaatgaagcagctgaaatgttagaagaacaaggttgtaacttaactactttatagcatcctatatgcagagttgaagactagacatactagctccctttcttcaaatgggtaaacgaatacacagaaatgttaaataatttactaaaatgtatgtagggatgactgcctcttgagtttcctgatttccaggacagcccacatcagattatgttgattcttttctggccagtctgagacctatagagtcccaacgttctctgatttcatccatacctatctttggaaatagtcctcaggaaatgagggaacaatacgaagcctaatgtgctgtgatgtgtgtagaatatatttgacacttgtctcgctaattaaaactctacttctctacccaaatagcggtgttgtaagagatcatcacactcacttctgcatttccttccttatttaatgtcctcatggtcacatgagatgactaaatgctcaggtcctgagctacatttccatgtttagtaaatcaggaaatagtgaaagatatgtcttgtgacattttcattccaaacttagactaggcatgagtatttaatgacaagcgaatagatgtgaatgagaaagaggtcaagatttgaataatctggattggtatctaaaataatttataagaaaaaatcatatatagggggttttaataaatatatttctctctatataaaaactctcctgattcccacaggtaaaattatttcctctttcgtgtatcaccatctgtagccctcacaactccgaaaacactttattgtactagttttacacacctgtcttttaaatgtaaagtctctacagaaaggaaatgcgttgtattgatttctgtattcctattaacttgaataatactgaaatacagtagatgctaaatatgcttgtttcataaatgtgggataaaataaatgtttctgtagcctacgccattaaggattttatactggagctgggagataatcaatcacgtaatatttagtggtacctactgtaggatgtaaaggaagacgacaatgagatgcaccctgaggacttgggaatggcagaaatgagattgttctacatacaagagagggatttttgtaaaactcaactgaaagagaataggacttgactggaaactgccgactatatttaagaccttatgaaaaacaaatgtatgagttggaaagagagttggtcactcatgggaacaatgagagagctgcagagtaatcctccaagtaagcactttgccaggacagtaagcagtcaaggaagcactgtccactatccaagctcatcgtacagaaggacactacctacccagtcttgtgggcaggaatctccttaggttaaaaaatatgtcaccaatcttcttgttctaatccttaaacctgtgattcacctgactagtcgcttttgccttgattccatgctcaccaagagttctgatgcctctaactaaactcaaagagctcacctgaaggtacctgaggacgtaggtgtctagttatgctagatagggatattttattttgaaaactaataaattagaatcaatctgatgaatccgaggaagatgagtttgcctctggctgatgtagtaacatgtggtatcctgccattcacatcactgtgcttgtgagtctgaggggcaaatttagatccccccaagatgattcctccctatgggtacttgtggtcttccctaagcatcacgtctttggctcctccatgagccacgtgccttttcttcaaacggctgcacagattatgtgcgtaacactatgctttaaaccactagagagtgatccaagagaacatataattaagtgagaaattgtttggcataaactaaaagtgctacagaaattccgagagaataaggatcactgtggtgggcaattatccaaggagagcttcctaaaggcctatggtgttaagagggaacttgatgtctgggtaggatgtgggtgggtggaaagaaaaggaaggcattttttttttttctttgagatggaatctcactcagtcgcccaggctggagtgcaatggtgcgatctcggctcactgcaagctccgcctccccggttcatgccattctcctgcctcagcctcccgagtagctgggactacaggcgcccgccaccacgcccggctaattttgtttgtatttttagtagagacggggtttcaccgtgttagccaggacggtctcgatctcctgacctcgcgatccgcctatctcagcctcccaaagtgcttaggattagaggcgtgagccaccgcgcccggccaaggagggcatttctaagaggagaatgtgggttcacagatatggaggccagaatgctggaccgcattgctgaagtattagaaccacaaattgggccaacatactctcttacttccttcaaaatgaaacctgaaaattgatgagaaaagtaagaaatcagccttcttatttaagccctgatctgtgagcatgagtaaaacaaaataaaataaaatgaatcccaatatcctatcatgtgtctagtttgagagaaggatattaacactctaattatttgctcttaagaccaattttttaaagctgtcactaatgcaatgaaaacatttacacaaacttctaaagcaaacaaagaaaaaacaatatctgtcaccaatagaaaagcaagtttgagtgctagagtacaataaattatttattatactgatactggatttgttctagagactaacatgaccacaggaaaggaggctttactaaataattcctagtaaaagaaacttttaaataatttttctttcattcactctaaaaaacaatcttcacagatagataaaagtattatctttaaaaatgcaacatttatgtcaggaaaaaaaacagacattcatgtgttttccctactcttaaattctttttttttttttcttaatttaagatacagtgtcttactcttgttacccaggctggagtgtagtggtgcaatcatagcttactgcaggcttaacctcctaggctcaatcgatcctcctgcctcagccaccttagtagctaggacaataggtgtacaccaccacatccagctaatttttaaattttttgtagagacaggggtcttgctgtgctgcccaggctggtctcaaactcctagtttcaagctatcttcctgcctctgcctcctaaagtgctgggattacaggcataagctaccatgcctgacccccattctttataataccttggcatatgggagatgaaggaaatagaaaacaaaatgattttctcctaggccagttgtgatacatcacctctttcacctgccgtgtagttggtattcagtgttagaaaaaggagtgaagtgaatgaagaagaacaagaggaagagatgaaacagaagaagcgaagaagtagtctgcacctgctcagaagaagtggtggccaggtgggcctccaaaattagaaatccagccctctctccatttcttgcctcagtcagcactgtctccatcctatgtctttccatcctatatttaagtcttgcttctggattaagactggcaaaaacaatatacttcctaaaggatcacttttcaaacatttatgcatatggaatagcagaaccctgtatgtgtgcccaagtgagggtacgctgatctaactccaatataccttgagacattgaacacaccaagcagttaaaatgggataacagagccaggcatggtggctcacacctgtaatcccagcactttgggaagccaaggcgggcgggtcacctaaggtcaggagttcgagaccagcctgaccaacgtggaggaaccatgtctctactaaaaatacaaaattagccaggtgtggtggcacatgcctgtaatcccagctacttgggaggaggaggcaggagaatcacttgaacccgggaggcggaggttgcagtgagccgagatcacgccattgcactccagcctgggaaacaatagcaaaactccatctcaaaaaataaataaataaataaacacatacatacattttaaaaatgggatagcagattttaattccaggacactcagtcaccaatgtaggtattccatttgactcactcccagagatgtctctccctctctttctgtctgtctctttttctatctgtatctctatctttctcacacacacacaagcacacatatgcatgcacatacttgcaaaattaaaaaacaccttcaagctttctttatggtccaagaggaattttgctgtacaaatatggttgcctttcaggaaaacttaacttcatttccattttttaacttctgttaagccacaactctggaattgtgtttctgaaaaaaagatacgtacttaaattttttaagagataagtgaacaatatctaacactgataatggaacaccctgttgtgaatgcattcaacttctaaaaggaatatagaaacataaatctttcacatttaagtggaacaatggtgacacaaagacaatcctgaaaaatgactcttcaatactttgaaattctcataaacaaccttttctcaagaaggctataaaaagagtcagttttgcctgagtcagagcaattttagctaattaatagcaccctctggacctatgaaaaattgacattctccataacagaccaagtttgggatgtggctcataaagaagctcccaacgagacttccatgcttattttctcctttagatccagagcaaacatcagcaaactatgactcaagggccaaatctggcctgcaggctgtttttgtaaataaagttttattggaacatagacacactcttttgtttatgtattgtctatggctgcttttgggctccaaggacagagctgagtagttgagtagctgccaatagtcatatggtccacaaagcctaaaatatgtaccctctggctcttaatagaacaagtttgctgacccctgatctagaggaatgatttccctcttctattattcttttgaactgaaagtcaggagaccttgattttagactcactccatcctgccagtaaacttctatgtgactttgggccagtaattactttcctcaggtttggtttcttatttgtaaagtaaggagggctggccctggtgatcatctattccttattaattctctttaaatgtctgtgttctaaggggattgagacctctcaatttttaaaaggagtttatttttaaaaggaatccaaatcaattaaaaaaggcatctttctttttgtaagatgtacactttctttttcaatgtaaaccagggttttacactgaaacacttcacattatttcaagcattcagtaccgagtaaaaccccttgctgctgtatcacagtcataccagaaagctgcgggttagagctggagagagaactataaacagcagtaaaatctgttttagacaaggcagcacatctgcccactgcacccccttcccaagaaatgcattgcatcacttgtgccagagatgaatgctcttttctgtcatgttttggtaagtgagtgctctacctcctctgtcgctctgggaccctgagggaaatgacaggagtcatcccactgaaggagcactttgaattcatgacaaaggcgaaactttcttttttcaatagaaatggggctgctcactgtcaaaaacttctgtgccactggcatatgcagcattacacaacttctttctagacatatgacataaagctgccaaattaaagaaatgatagtatagcaagaattgtctcctctcttccaaaatcttcacaacagcaaagaatcttttgcaattgctacttgacagaataaaagatttgagatattatgttatcttaaaaacaaaatcacctacggagctttaaatagagatcagaaaatgcactagacctcagttctaataactattattttaaaacccgaaagtctgtatctttcaaataaacatttttttcccacattctttctgcctggaaaataaaggtattttggggtatctttgagtctctgagccagaaatcattcgttcttagtctccatagtaggagactttgaatagaaatatgcatacgtggaatttagaaagcaccatgaatgcgtactcactttaaaatgttagattttaaaacagaaaggagagtctatcaaatgaagccgcttgagagtttttataaaacccaaagagaatatatattaacatataacattgttatatgtcatcaatctggagggttgataataacattgatatctggatgttatcaaccctacagataacattcagagcttggttactgtcttcttagtaaatatctatggtatactgagctctctgcctttaccacatattatatagtttggctggcagctttgttttcaataagtgcttttctttgcaagaaaaagatgctagtgagtgccatctatcatttctgctagatcatcttccaaaatcccaaagaacagcactgtctgcttttctctttctgacagagaaacctctgaactggatgctaatattttgcagaccaagcatgagccaaaatggattaaaaaatctaagctggcatatctgcatcagtctaagcagtttcaaaggaagaactgcaatgttaagctgattattgtagctatggttctcccttgtccggtcccctccccgagttctgtattttatagtaatttaccttctcttcttggccagtcagtattcttctcatcctctcagatcctgcttaagtcccatctctgtgatcacacttctctctcgccctcacaaagctttgaacatagaaggggcttataaaaattgttggtttgttttgaaagtcttcctggatgacctcagcccatgttgatctctaccttccttaactcctttgagacttactgcctatcgcacaattaacaccttattatccttggctctaatagcctgtaccacataatacatttcatttcttctttataattgtttcacaggagttgattttctaactccaattaaattgtcacctcccgataagtgaagctgtgtttccataatatctaaacaaactgttaggcacatagtggacatccaaaaaatatttatttttcaatctatagcagctttcacattgcttgaaagatttgatagttgtgtcacaggcaactgcagaccaaacttttattcattaatgtaatatgtaattgtcgtgtattgaatctggctgtggatacaacacattcggaaaactacataatcttttatgcacgcctactttcttcaaggctcacagatttccagagtttacaccttgctcattgtttagaatgtgatgcaatgaaaggaatctgctaagctaatgtttattttaacaaacactttgtttgaatgcatcctgacaactcaagcatctgttttaactagaaacatcaactgagctgacttactacattgataaaatttgaaaaattgctcaatattctgctttgttctgcctgtatggacaaagtctaatgctttccgtgccaccaaattagtacttaagtggttaaagtaaccaaaggagcttttgtatactctatgccagctggtgttctaaagagaattagacctgaaatacccagctctcaggacaagcaattagtacagagctttagttgtttagttgggggtttcattaatatggaagagacaataaaactgccatttacactattacagagtctgatttaagcatttcatgctaggacacctcacatatgaaatcagtgaagggcttgtataaaggaggagagcaatattaagctcatcagacacaaaacaaaactgagccaaggtgtatctgtgttatgtttcaagtcaaataacacattctttacttgcaagtgagacaagatttatttttccttaagtggctaacctctggaaataatttgtgagaccagagaaaaagaacccaattttgaatgaaatttctgctgtgagtccaaactttgctgtctctactgcagcattcccatgattgctatggttttcactttgcaaactccctcacaatgacatttaggtttagctcctggatcgataacttttttccaaagtttgatcccattgtagctattatcgctgcagacaaaacttcctttattgatatgatatgtagaagtgggtttactaaggtttaatgagccagaaattactagaagagctatgtagaggcatgtgagcttattcaagtgtctggtatgaacagagcttgtcagataaataatgtgtttacaaaatggggtagaacattattgagtcactgatgaaatatagttgatggaagcttcttggagaaacagaactaagcaagagagaatttaaaaagggatttgttgaaggatcagtgtccaaaggagtaagtagccactttgggtttcagaagtctgtggagaaaatagaaaatgaagaggtattctggccaaagtccaagtaataagcaagctgtgacaccaggattgaacctaagattaggcacaagcttgccagctagggaaaagacaggttgaaacaactacagctgcaaccaaagatgggaatcacactaacattttaaagtcagaattggtccattaaatactcactttcctaaactttaacatgatgatacaacagatcccaatccttctggctgccataaagtaaatgtggtgctgttctctaaatggctgttatatagtgttaggtttgaatgatttaatacttgggaggagacagaaaaagctctaggttccagcccactgaggtggcttttctttccttccttgagtgatggcagtagaagagacggaagtgaatagctgttgacccctattggaggctgtacctgccaataccagcacttctctcaggaagcttagaagagactgatagaaagcctatggctattttcgtcaatttcagagtaaaggcagattcctaggacgaaatcaagaatgttcagagtttgagttgtcctaaaaactgaggctggaatgtgattatgcttttttcatgattcagagtttctaaattactgtgaattgatgtatcttgagtttatgtttttgaattcaaagtacaggcgaatcaagaaaaaaaaaagtagaaagaaaccttggtttcaaatttgggggctaccatttactaactgtccacttggagtttccatttggagtctattgtatcattaggacatagaataatagcacccatgtcatagagcagcagtggtggtcatgtcccagagtagaatgaatgttggtcaataatgtaggtatattagtaagttctcaaacatttgttagtattcttcaccccctgacccctttctcccagccactatgacacagttgtggtgacctgtccatgtcttcttaacatttctgagctggactattcccattggcaaattagggaaacaattgattctgaatagggtggctgtagagatcattgagattaagggaatttttcttataggcttcataggcatcatcatcagttacagtctatgagaatatattaactaataacttttttctttgtggctattacagcacttcaatttagaagctacattcaaagacaaaagctaaacaaaagctaagggtctgtgtcttagaatgctaaatcaccattaaaataaaccatttcaaaaactcaattagctgttcaattttatactgtgattattctttctccaggtttttcctgacatacaaaaaatagaaaatttggtttgttttttccatattaagaaagctgatgtcacgcctgtaatcccagcactttgggaggccgaggcgggtggatcacgaggtcaggagatcgagaccatcctggctaacaaggtgaaaccccgtctctactaaaaatacaaaaaattagccgggcgcggtggcgggcgcctgtagtcccagctactcgggaggctgaggcaggagaatggcgtgaaccccgggaggcagagcttgcagtgagccgagattgcgccactgcagtccgcagtccggcctgggcgacagagcgagactccgtctcaaaaaaaaaaaaaaaaaaaaaaaaaagaaagctgatgaactgtctgtgtcagtgttatatatttagtgggcttattattatttttgcaatgcattggcacagctcaattttaaatgcaattaccacattataatcttggcaagacccactgttccaaataattctctgatgtacaaattagtcttcctactaaatgaaaactgccagcagaaaggtactattacagtatataaaaatgaaaagtctcattgaagtacggaataactataaatttcatttcagaagcatatactatatacacacaaacttaaaaaagttataattaagatgtctaattctcctgaaatagcactcaaatatataataattccctgtagggtatgtaggcagtctggatcaaacagcatctccctatgctgtgaactagaaacactactagactaataggttgaactatttcttctgctatttttccagaatatgaagataaacagcaattgaagtgtcatcagaagattctgcaattattttttgatcaccaacaccatcggctgttgtgaggtagagtttttattatagtatatatttacaaatgtcttcaacaacttacagtattttcactagttctgccacacagtagtaccatacattgtcttctcagcatcaaagatttagtgctttagcagagaaaccaactctgaaatgaggactttgagactggcttttatttcctactaggtggtccttctgggaagatcagtgcacagcttctctttccaacatctactaaaaaatccttttgaaacaatgtgggaggctgacgactattcccctattgcagtggtccttgacagggggtgatttggccccccaggagacatttggcaatgtctggagatatttttaacttttgtaactggagggaggggtctactggcacctagtgggtagaggccagagatgctggtaaatatcttataatgcacaggacagccccatacaaaaaggacttagtccagaaagaaaatagtgccacgggtaagaaaccttgccctattggcttctctgtcaacataacaggtattgcctgtgaacatttgttgccagagtgagtgtccctgggacagtgttgattgcggaagtcaacagaggaggagaatttaagtcctccacttcctgctgggctctcataaaacgatgcaaaccaatgggcccttggtttgttttaggttagacttgtggaagttttcgaaattctagttttgctctgttcaatcattttagaaaatatctaagtatcgttctggtttgaattagtttgtttggtctatttttgaacatattttgcttcagttacaacattaatatttgggttttattcagttcagggttcagcaaattagcaaaattacagctttgggttatggttacttgttatatatctttgcatgagagcccatgcaagtgtgattggagcagaaagctaaggttcatcacaaccatggccactagagctttctatgatccaaggaagttaattcacttttttactttgtttctcaagaggattcaacaatgcaagcaccaaaccaagtggatgcccctctttctgttgcttggtttaaaattaaaacccttgatgaataaagtgatttatttcatattatatttatgaaaaggtagagcactctcaatgttttgagtattcctgaaactgtttacttaattatacaatgagaaacaagacaggaaaaaacttcataaaaatcactagggattttaaaaaaatgcccatgtactcttattttgcaatggctctggttgtgaaatcatcagactgaaaaatactggaggagtggtgagggtggattttagtgacaagatttccttaaggctgtaaataaaccagattcagtaagagaaacagagatggcagttttcatcataaaagggggaaaacattttccagttgaattataggtacagcacaaaacagttgttccgtttttaaaaactttagtttctgcaggctgaaacagagcatttcatttggctcagttcatgaaagccatctgcacctgctcacgaaacagcttaaagagaaaaaaaaagtgtgcaccaaggattttaacttacacagacaataagggatagactctggcactcaagcactgaaaaagcaggagcatgataaaggggaaaggatcataattttatgaagtgccaataaataataaccccaaatcagcttacagcatcacttaggtttacctgtggaagctacacttgcctgttctggttgcatgtttaaaagttaagcaattaaacctcaattatataggtttttcttttatgtagcctagggttgaatgcattactggcaggaaactttagctcatgaattcaatcaaaaatcctttcatttgtcagaactgcttcctgctgcctcctttaaacatctgcttctccagttcagggacacacacacacacacatacacatacacacacaccccctctttgttaaaataataagcaatctaccaacttcccttgcaaaagttacattctctcttacacacacacacacttgttcccagtagagtttatttaatgtgtcttttatagcttccttgtccttctctcttcctttccgcttttaaattctggaaaacctcaagctgacaaaagaagacattttaaaaatgcgaggataaggcccggccggcctccagaccaatgagaaggaagcagagcaaggaggcgggggaggcggggttggctgtcgggaattgcctgcactccttaaacggcaggcacttcctgctagaggaggccagctctgaacagacagaaatcgggtggaaagctagcaggaggcgttgctcaagttcaaaacaatctgtgcgtgtccaggcacgcgcggagccagaccccagccgcgcggctcagacctcgcgagagccatcacctgagaaatccacagccttttctcatcaggcttagactgtttttcccatacctccaagaaggaagacccacatgttaaaactatgagaaaagctgaaagtgccttctgaacagtcatccttctttttcttttttttttttttttgagacggagtctcgctttgtcgcccaggctggagtgcagtggcgcgatgttgtctcactgcaagctccgcctcccaggttcatgccattctcctgcctcagccttccgagtagctgggactacaggcgcacgccaccacgcctggctaattttttgtatttttagtagagaaagggtttcaccgtgttagtcaggatggtttgtcgtgatccgcccatcttggcctcccaaagtgctgggattactggcgtgagccaccgcgcccggcccagtcatccttctttaaccacgacataggtactcaggtccgctggccttcctctgcactgatggacttttctttgtgaaactgattcagaggcggacctcaagtggcttattccttcgcctaaaaatcgtgctgctttttcctctagtgaagtctggagtacaaattaataaaaacttggggctgtgcggcctaatggctcaaaccgtgttccagatgttttgaaatattattaccccttttgagagcctcagtgtctccctggagggtaagacatctgccttaagggcacttaccaagaaactacaaacatttgactgcacacaacaatggtatcttaataagacaaggtgcttaatacaactggctgccctattatgacgtgtaagaacgttttcatatgtaagctatgcttgcaattctataagtagataaggaagcttgtggttgttacacttctaatatatggatagaagagcttaaactctaatgattagaaaattactggtattctgaagtgtattacaatcaatgcattcatgatatctacacgttgtaattattcatccttaaattaaaaatggtttatatggttatagccatatatatcgattattgttttattatattaataatagctaacatttctgagcactatgtgccaattataacacaaagttctttacatgcattatttcatttcacccctacgactctacagaactatgattacattgaagaaacagaggtttgtatcattcatttgctataggccagggagtgagttaacaaagctgtgacttgaacccagcacctggactctcagagcaatcacacactattcaaccatccacccattcatccatctatccgtctgtctgtccatccatgcatccaatcacccacacacccatgccatccaacatgaaatgtgtattatttggaaagacacagtcataagatgtgcacaaaatacttaaaaaaaggatctattttgtccacctgaaacaaaaggaacatgctgtatcttaaaatgtcagatgttagatgtgagattatacatccatactgaactgtagaaacaatgaataatacaagcaaaaccaaaaaagccaatgcaactgatatcaacaagaaattcaatactcctctgacatacaaaatataatactcagtgtatctctcaaaagacaatttttctttgaattttccaaataatttgcaaaaattaattcagggagccttcaggaaagtgccttccgaacagtcatccttctttttttttttttttttttccaaaacaaaacatgcttagcatgcacacttttaccacttttttcgagtggaaagtttattggcaatattaaatttcaccctagataggatatgagaatgttttgataaatcacaatttatagtatattaatgccatgtgagaattttgtttcccaagtaagagctcacatggaacttggtcattaaaccttaaagaaacctttctcacatatctataggcctcaaattgaaataatctataaatgaatttgtagatttctttttagtttaattcctgagtatacagggcaaaagcttatatcctttatataaacttctgctttggtctaaaactgatatatcttcacgttgaggtttcatctgaaatgcaccacgtttgctgacttgcttcaatatgaatttgtatggctatgaaattgtgccctaactcaagctatttctatgttcacctgaatcacacccatacctaattttttttttttttttttagacagagtctcactctgttgcccaggctggagtgcagcggtgcgatctcggctcactgcaacctctgcctccggggttcaagcaattctcctgcctcagcctcctgagtagctgggattacaggtgtgcgccaccacatctggctaatttttgtatttttagtagagacggggtttcaccatgttggtcagcctggtttcgaactcctgacctcgtgatctgcccccctcgacctcccaaagtgctgggattacaggtgtgagccactgtgcccagctgcttaattctttatatttcacattcaacaaaaacgtggaggcttatcatgtgctaggtactatgctaggcactggggacacaaagcaacatgaaacatggtccctatgctggaaagagttacagacttgtgaaagagaccaacaggtaaatacatcctaagaactggataagtgacaaaaatgaagcatagggactcataagaaagtttgttgagactcataagaaagagtgattaactcagggaaagtcatttcctctacagagcatatcattcatcccttcaacaggcattttttggattctgaagtataaggaggtgtttataagtagaaaaggcaaaagaacatcatatgcaaatccctgaagttctgaaagggatttcatgttcggggacatggttgaactacatacaaaatgctatggaagcacaaggcatcatcaagcacagtgattgcttctgcctggggtgtcaaggagggcgtcagagaggagatggcatgcgatctacctcctcaacatatccaaaaactctgtttgtaaactgataattctgaaagccatttcaggtacactacagattaagtgctcaatctctttagtataaaaccagtgagaagactcctgcattgtttcagtcaaagtatgaatggagtcaaatgtctgaattatttggtgacaaacaatgaactgttcccacatgcacagtagagacagttcaggctgcacttactgcagtatcatacccaggattgtagttacccatgttgactgttcaatgtaatatatacagtttgaggttggctctgaggaaaccgttgtggacacacacagcatttgtcaattacgaatggagaaccacctccctcagaccagtagttctcacagtctcctcaccctgtctctattgttaatgccaagtgaaacaaggacataattcatactccagttgcctttcttttcatgtgtggcatgatcaaaagaataattatacagagaggaattctgcagacaaaaattgcgtgtgatcctccttacataaggaccttagtgtgttgctggaaactgtctgattcattctgttgactggcagcttcaggttacaagcagagaacagagagccctcattaatgtctttctagcctcaaatatggagtcagctcaacacacacatttagtcttgacaagtatatatcagattcagaccatgcaaaaaaaaaataagtaaaccttcagaaatagtttgatcacctctaaggaaagagggcacagacagctcagttaagtgactctagagaaacagtttggagaatttgctaagaattctgagatagcagttcagtggacgaaaaaatgtcactatgctttcaagttcccacacactcttgcttaacatcttatatccccaccccaacccacaagcataaagcctagatcagaaagaaaaaggtcaaacttcctatgggaaaaatttagcattttttaccagaatgatagattggcatctgctttccaatcaattttaccctgtttaaatacaactttgtccactttgcagacgcccactgccactgcccctgcccctgtccctgctaggcagaagatggtgaagaaaaacaaactcagcatcgttagtctcactggaaattctggaccactaacctcaaatgggccaatggtgctatacccattctagcacattcttctggttccattaactctttcattctcctacatgactacttcacaccttttcctctctcttctaaacctccagcaccttcttcccaattcttactcccagttgctggatgaacttgattcctatttcactgagaaaatagaaacaatcagcacaccaacaaccttccaccaacacatctgaccacttaactgatatgtatacccaccttcaccaatatgatagtccctactgttgaatacttgaaaactggctagttcaaactgaaatgtgctgttagtgtaaaatgtactggattttgaaaattaaattttcccattaatggttttatattcactacatattttaataataatttgtacatattgggttaaatgaaatcattaaaattaacttcacctgtttttttactttttttttttttttttgagacagtctggctctgttgcccaggcaacagagtgcagtggcatgatctccgctcactgcagcctccatctcctaggttcaagcgattctcctacctcagcctcccgggtagctgggactacaggcacctgccaccatgcctggctaattttgtatttttagtagaggcggggtttcatcattttggccagactagtctccaactcctgacctcaagtgatccatccaccttggcctcccaaagtgctgagattacaggtgtgagccaccatgcctggcgtgttttactttttaatgtggctactagaaaatttacattgtctttgtggctcacattacacttaattggacagggctacttttattctctgctattactacactgttactggagatgaaactaccctctccctatgcattagaaccccctcctctttcccacccagggacttcaccccagcaattctccctgctttctcctttttcattgatttccccctctaattggatcattctcatctgcatacaaacatgccactgtattttttattttaaaaatacaaaaaaaaatcttgactacatgtcatagttcagttcccaccttatttctttatactagaactccttaaaaatgtctgtactcactgtctccaattctcatttcatttcttatggatctactccaatctccaccactcctacaaaatggctcctgttaaggtggtgtgtggcgcaactagcagaagctaattgttaaatattcaagaactttgcaagctggttgttaaactgtttgtagctggaaattgactatgatgggaatatttccacagggaaatttagtaaacactacaaatcaggattttgctgttgtcactgcttttcagagagccagtttaccaggacaccactgattgaaagtcaccaatgactttcacctgactcagtgatcaattacagtcttcagcttaactaatttattggcagtatttgacaacaaactctttatctgacaaataaactcttcctccttcttaagttctttcttcactagccttttggggcactattttctcttatgttctctccctcacttctcctctgtctcctttctgcttccacttcatctttccgacctctagatattggagtgttagcactctgttcaaacgcctcttcttttctttagctatacttctgctccaggtgttttctttcagccttctagccttaaatacataaatgtacacttttaagccagcccttgcgcatgaattccagcttacttattcccctgactacttggcctctccgcttggatgtctaataggcatgtcaaactaaaatgtccaaaatgaaacttcagttctctcgcctcttctttcctcagtaaccaaaaatgacactccaacaatatccctccagctcaataaatggcagttctagctgcacgagtcacacattttgagtgatccttggttcagttctttctttgacaccctacatccaacgtattggcactactcttggctctgactttaaaatatatctaaaatccacacttttccccacttttactgctactagcttgctagtagctagtaactagctccaagcaaccatcacttccaacttgtgcaactatgcaataaactatgcaacatatctccatacaatgtagacccagagtaagcctataaaaatgagctagatcttcttatacttctgcttaaaacactttgctgcctgtcttacttagaataagaccaaatcttcgtattggtctacagagccctacaaggtgttcctgctacctctcagaactcatctcccatcactcccacctagtttactctggtcctgctagagcctccctgcaattcgctcagagactttgcacttgctattccctctacctgagaactcgttatccagacagtttcacggctcgctcctttacttcctgcaggcccgctctgcatgaaattaatcccctccatggcacttatcaccctatggcacactacagtattacctgtttatgagtatacatccatctaggcttggtagacaaattatctgcttttcttttttatttaaaaaaatgtttaaaatttaaaaattttttattcttaaaattttattttttaaattgaaaaaaatgtacatattcatgaggtacatagtgatgtttcaatacatataatcatagtgctctgatcaagataattagcacatccatcatttcaaacatttatcatttatttgtgttgggaacatacactatccgccttctagctagttgaaacaatatattattgtttgctatagtcatcctacagtgctaaagaacactagaatttattcctcctatctagctgtaattttgtatcatttaataaatatctccctatccctttatatctagcagttagaagagtagtgcttggtccatagtgaaagctcagtaaattttgaatgaatgaatatattgatgtcacaccagcagctctggagcatgaaggaagctactatcaccttctcttctgtgtaaagcattaagtgatagacacattttaaaatgacaagtgttcaatttctctgccaggctgtccttgcatacagactaaatagggaggctttttggactggcaaaacaattaaatacgacttgattcaggattaatagtaacttatttggtgataatgacattacaaactcttttcttcatattgcaaaaagaggatttctccatcttgaaagcctcttaatttcatacttggaggacctgcaggaagaactataattgaaacaactgaaagtatcccttaggacattggctttggttgatttgtggagtgatggtaaggggtgagggagaagagggagcaataaaacaaatgccaaagtttttagcaattttatatcgctagcaataaagtagtctttacaattacatacacataacaataactgtttccaccccgccatccctcattctcttctgccattgatgttgcccaaaaactgaggctgaagttacccagtgaaaatcatgtcccgcaaaatgttgtcttttactaaagatggtagagtacaggcatgaggcctctcatccctagaattttcatggaggtagctgtgtttcagatatctctgtagctagaattcacagcatgtgctatgaatcacacatgattggtgatctacggtaccattttttttctctaaggtattgggataattagataggtaggcctgagttttaattatgtcttataacattttttatgggaaagtgtattgtgagattcaaattcttgttttataactgaattttggaagacagaacttatgtaagtaaattggaaactctggaaactgcctgtattgttattagtagtaagtaggattactaaatttagagttctagctaagcccaaaagacaggtatgttttaaccttctatggtagtaggaataataagcagtgattatcccttttaattttccaaacatgttatgaggtgttagaggttccatccatggtggaatgttggagaagcatcaacagaaaaaaagaggcccacaaatacaaacccttttttttttttttttgagacggagtctcactctgtcacccaggctggagtgcagtgacgcgatcttggctcactgcaacctccgcctcccaggttcacgccattctcctgcctcagcctcccgagtagctgggactacaggcgccggccaccacgcacagctaatttttttgtatttttagtagagacggggtttcaccatgttagccaggatggtcttgatctcctgacctcatgatctgcccgcctcagcctcccaaagtgctgggattacaggcatgagccaccgcgcccagtcaatacaaaccctttcaacaccagacggagtagcaaagacactcctggttgtatggcctggctaatttccaattgggtctaaatactttttcccataaaattacactcgttatgctgttgggaaatatgtgcttctctctctctacacacacacacacacacaccccacacacacacagacatgtacaatagaaaatgaagtcaaccaacattaagttctgaaaatgtactacacattttgctgagttctctatataaataacagtgaatagttaccttctacatgtgtcaagtatttcacatgcattatatctaatcctcacaataatgaaagcaaacccttatgtgatgttttgtgcaaggcattgttctcagcgctttaccttgactaactctttttttttttttttttttgacctggagtctcgctctgtcacgaggctggagtgcagtggagcgatctctgctcactgcaacttctgcctcccgggttcaaacaattctcctgcctcagcctcccaagtagctgggactacaggcgcgtgtcaccatgcctggctaatttttgtatgtttagtagagacggggtttcaccatgttggccaggatggtctcaacatgacaggcttatgaggcaggaggcagacactaacatcactgctatcttcagatgaggcacctgaggcaagagaagttagatgagacttgtccaaggtcatatcaggtgtaaacagctcacctaggttttaagcataagcagtctggcttcagtcatgttcttacacagccacatcttgctgccttttacacaacaacctatgagaaaagcagtttaattgtctccattttcctgacgaagaactgcataaagtcccttgcctggttaaagggcgtaatgggatcccatctcagggtgctgacatgaaagtgtgggttctcacaaaacagcctcccactataatatcgtgtctctttaaacaaatacttggtttcacaaagtcaagtggcatgccttaaaattcttttgcataatccccctcgcacagaaatacccaaggctctgcatatagtagagcctatagtagagctcaacagaggaaagagattcacacagattgattttgcatcatatgtaaataggagccaaaaaaacccttcaacaccacagcttccctttattctgagaaaactccaaggaaaactgactttgattttctaaatcatcttttgatttactctagtagaggaaaatcaatgctaaaataactattgaaagccatctgagatgtgctgctctaacatgacaatgccaaggaatatagacattaaattgatcttggaatccaagctccccttccttactcaacacaagacgaaatcacaaaatccatatggaggagaaatcttcctatctagactgtaggacttgtcatttactcaaaacagaatatctcccatgccatcttgtttacgaagcagctaatgttgttacttctgtactcaagtgagtgctgcctctttgtaatattgattgctgggatttttgctggtagtacactgacagagatcgaccactaaaatcttctgaggcgcatttatctttctctttgagagagaaaccccattttcctcaagaaaaggcaaagctgttccagcacatgttttaaatgattcatattatctgacaatggaaaggtaaattctctcccaggatttagggtataattctcagccatctgagaattctgtttatcccaccttgtctccttgctcagagaattacaattagatggaaacatctaatgtcaaggcatctgatagctccagcataggatactgtgactgctccagatagattttctccatgaaaaccaaagttgatggttaattaccatgtccccttctcattatggcactatcagacatatttaaggaagtgatgagaagtctttgcaaaggtatataagaataaatacaatacactgaaggtatcacttacactttctttaaaggtaagaatttgtgagacttctgggagaattttgacaggtcctattagaggtattttaaaacacacaggggaaagtgatttgatgttaagcagtggcaaatctacacaaaaacaaaaacagtcatcggagactttcactcaatacaaagttctaccagacctatgcaaatagtaatcgcattttctagaaagagttctaaagtaagtcacacacacaaacctcagtagtagcacaaaacatcctttgttgccggacgtgagaaaaacacactcgcttctaaaaaaagccataggaaggaagtggaagaacctcaggggcgagtgggagtgcgaaaggaatgttgcagctctttttttttttttttttgaacatgtaagcttgctgtggctcttaatagtagggctagtagttcaagtaagtgaagtaaaatctttgggatcttttttacctattcttgtaagtgtactatcagccaaataggtttgaaaatcttgacaaaaggacgttgatattctggctttacattgccccattctaaaaacaaaacaaaacaaaacaaaaaaaaaactcttttaaaaagcaaaatcaaaagaactcaaacacctgcatatgattctaatttcacacatctcaaaacaaccaagattgccaaaagaagaattaaaagtcgttccagagcaaagatgggtaagcaaagcaatgtgctgaaatttttgcaatgtaacaaaatggaatatatttgtcagaggcagaggataaattgagggctcctttttttattttttatttattttttgagacagggtctcactgtgtcacccaggctggagtgcatggcgcaatcacagctgactacagcctctcccaggctcaggtgattctctcacctcagcctcccgagcagctgggactacaggcgagtgccaccacacccagctaaaatttttttggcattttttttttagaggtggggtttccccaagttgcccatgctggtccggaactcctgggctcaagcgatccgcccaccgcctgccatggcctcccagagtgctgggattacaggcgcaagttaccacacccagcctgagggctcttttgaaaacacaaatatgatcatgtcacttccctgcataaaatcctttaataccttctcactgtgctaaggataaagacaaaattatcaatatggcttacaaagctcttcatgaactgttcgttgcataactgtcaagcatcatgttagagctcatattgattgaatgctgattactgactgagcatagaaactatttcagtgaatcttgtaacaaccttttcaggtgttatccccattttacagaagaggaactgggaagttgagttacttgcctaagattataaagctagaaagtggttatgtcaaacactgttgaggaaatcaacacacattcccaatcccctctcacttgctgcctccattgttaggggtggacgatctattttctcactttcacatttttcctggttatttgggttgtgttctggcctatgacacccaggtagaattccaacagaagatttctgagaagctttgaactttcctgataaaataacctgacactgcacatcgtcccccttcttcctcaacgggccattgtgcctggggctgcagccgccatttccagatgagggaatgacaaagccacaggctacgaatgcagagcagaagacagaaagaacctggatctgtgatgacctcatcatgccctgtatcagccctggacagcttattgcttattgtcggactttttgttttgtggagataatttccccccaccgcctttttttttttttttttttttttttgagacagagttttgctcttgttgcccaggctgaagtgcaatggcgcgatcttggcttactgcaacctctgcctcccgggttcaagcgattctcctccctcagcttcccgagtagctgggattacaagcgcccgccaccacacccagctaatttctgtatttttagtagagacggggtttcaccactgtggccaggctggtctcgaactcctgacctcaggtgatccacccgcctcggcctcccaaagtagtgggattacaggtgtgacccaccgcacctggccaatttcccctttttatatgaacctcagtaaggtaggctttctgttctttggatgccacaaaaaaaaattcttaaccgatacagctaggaagtcaggattccaacttgaaactctgattccagagcccgtgagctgaattccattcctccctgtttctctctttcttttgctctctttgctacactgcagcacatcagtggccacgctgatctcgaagttcctcaaacgaccacatttcttcctgccccacacacagcctttgctcttccctctgcctgaggaatcttctaattatccttcagatctcagcttaaatactgagatacttagccatgtcagtattaaatggaacctaaatatttccccctatacatgggttcataggaatctgtatttgttctctgagccttatcacaattacaaacaaataagaacttagtgcttgtcttcccatgttacatggtaagttcatgaggttaggaactgtgtttctggttgtacatggtaggcagtcagtaaatagttattacattaatgaatcaatacaggcattcctcgtccacagtcaactcttgagctagacagacaaagataggaagttacttattttacacatctgaagccacataagtatgtccggctgcaatacatctggtttgactctatcaaatgccataaatatctcaacagaaagaaaggaaaaaacctacaatccagaagcaggctgtgaagacagaggacaccccagtaagaaagaaatgaatactttgggtagtagcaatctcagaactagaaaaatgctacaagaaaaccgccagtggcaagacaggaactatattgaaaacagggattaccttgtaaaaatacagtttccagcagaccaaaaataggcacaatgtttctgtgatcccaacttttgcattcagcattttgagaggtttttctgtggaaaagcatttccaattttacagtagagttgtagacaaatgttgcaatttatttaagctttgttttattgtcaaatttcctgtagcccatccactccatgaagcaagagataactggtttgcatcatctttttaaaatcacagctctggatctgcactattggaacactctcttgtcaccctgcaattgatcctttcatacttctttctcctccattggactgtaagttcttgaaagtgggaatcttgtgactccaatttttcaatactgagcacagtgctggcacagaatatgaactcactatatcttgttactataaatgaataaacaaaatgcataggcatgttaggcatttagtaaatacatgtcaaattgaatctttgatacatgacttggaattacttccctttcaaggtatttgttcagtgagcataattatagagtccacagtctaacagtcttcattatagagaaaaaccgaaaaagagcccttggcttttcaagacaatatgcattgatggcaaccccctttttatcatgtgcatatttcatgcacaaggacaacttaaaacttggaatgaaaaaaaaacctctataatatttctttgctcaccagtgctgcccatttctggtattctctctttactgtgtatcctgggggtgatgggaagaagaggagagacgagaaggacttactagtaacagaaaggaaaataatgaattgggaagaggagcaaaggggatggtgaggactggaataacaactttataaagaataaaagtctgattcccttctatttcctgcagtctctcattgctcctgtctctgataaaatgcctacagatttgcttacttgatcctaattttatggcctgttcaaatattacaacttctttttaaataaattaatttggaactaaatgcctttaatttttaccgtgataggtttgtggctcttgacatcttttggtcctattcatcaaaatcatttgctaagtccaaggtatagcagagtggctttaacaacaaccatggaggatgaataaaatacattttcatatttactgaaagtgaaacttataagcatatatcatcttctgcctaccttgtaaatatcccatgttttcatttacatattgtaccaattaatatatcttggtactaatcagagtggaatccactcctgacatgggagaaaactacgacaaaaaacattagcagcaagaaaaaatgtttgtttcaagtatgtggattatattttctagtgccttaaaaaaagaatgaaactgaaagaggcagcttgaagaagcttacatgtgtttaaaacccacatcctgttgttatccactgccctggcacagaggagctgggaggtgaacgtcctcattagggtccctattagctgtgatttgcaatgggcttctccaaagaagaaaatcacattcacccactggacaatggcccaggtatcaccattgatgggaatcatatatggagtaaacatcaaagcccaagaatacagtggtctaagccagtgtgcttagaagttgccagatcctccatgcttcattccagccactatcagcagattctaaatcacctatgagcagagaggcccatctgcctagggcataaacgaaattataacaacagtgagagagccaatgggagtcagccagtaagactatgagcagcatgatgtactcagacttttgttcctttttatttatttggttaaaatacatgtgtttttgcttcaggcagatgttggtatcccagccttttatacaggaagctgtagaagggagaggactttctgggtgggagcaacttattgtggaggccaaatggcattttttgtaggccctgagattttttacgaaaacactaactctgttcagaactctttcaaagggtgaagacaaacttaacaaccttatactataatacaaataattacagagtgttgctttaaacttgtatcttgaagttccttctttaggtaactctgcttaacaaccacagactcttcttcctaatggcttatctgcatgtcttttcaattttctaagtgaaggccagcccccttcaagatgttctaccaactcagtcctattctttccagatgttttttttctttttcttcttctgaaaagcatgtgttgatagactatggggaacagaccaagatttattttttagccagcattttccccttgcaaccgtaagtcattcttcctcagaaggcaaggtggggcaagtgattctaatgtgcttcgctccaatgcttccatctcaataaccctttaaagtgaaaactgtggagagtgaagtgaaaaacttgtctccatctggaagcatttatacagagaggtgtctttagcttagttgtttgtctagaatttccatttatgaaccgacttgcctttctcctgtgggtatgctggagaaaactctttgcaaaatccattgtatgcaataatccagtggctccttcaaactcaatcaggctggaaaggctaaatatgactcataggattcctccaacaaacacaaagtaagtcagaagtcaaggagagagtcatctcgatgtggaccagcttacctagcaaggcagggaattgtcataaaaccagtttcctgcttgcaagaccttgactcctttcagtaaaggtgtcaactcttctttttctgaacaatctcaatgtgaatgacagggcctgattctagaggaaggtgtctttaatctttttatggttcagtataaaggttaccttaaaaaaagccttgggatatactttcaagatactgacttgtgattttttttttttttttaaacatcagtatgtcctgttctaatttaatcattattctttcaaacaggctgggaggaaaggttcctggacatccacagagaaaacttattcaataaaacattttataatcctcggaacacctgtgccaccttcctaaaggccagtcagttccaggacttcctaaaaatgaaggttggactgtgtgaatgcctgtgtgtgtgggagtggagtcactctgtgtggtgttgggggatggggtggggggaagcaaactggcagactctagaaggatggtggtagagcagaagaaaaaagaagaatgtctgaatctggagtggccccatgagacccagtctgtactcaggtgacactggaataacaggagttccttctaaaaccaagagagcagcagacactctgtcatgccacacccttctcaactgtcttatcccttggccgtctcctttttagaagctaaagcaatacatttttttcttcagtgtctcttgttcttggaatggaggtgcagcatagttccggccaataagatggacatctgataggagaggggtgtgcttttgggacactttcagcttttctgataagaggaacaccagggctgccctcactcctccctccagtctgccaatgtgatacctgcagtttaagactatgagagaaaggcatagagaatcacagacaaactgaccctgagcagtgatattatttgagtcactaaactaatacccataatgaccttatatccagaaatattgtagtgtgtgtgggaggaaaaatccctatttgtaatcactttatttcttacactgttagtcagttttctgttatttgcaggcaaaaaaaaaaaaaattcctaattgattcagcagaggaggcagatcaaatgagtagccatcaactcttaaaaaggttgtttttttgttttgtttcgttttttgggggacagcgtagctttgaaaaacctgagtgaaactaaatattcttctgaaggtaaaaccaatatagcatatcatggagcctcataatttatttcaaattttatgcctgaaacaacttaccatcattactctatgctatggtttgaatgacccctccaaaacgcatgttggaacttaatctccaatctggcagtattgacaggtggtaactttaagaggtgattggatcatgaaggctctgtcctcataaatggattaatccattcacggattaatgggttatgatgggaggggaactggagactttataaaaggaagagagacctgagctagcacattagcacgctcagccccctccgccacgtgatgccctgtgccacagaatccccaccaccaagaaggctatcaacagatgcagcccctcaaccttggacctctcagcctccataactgtaagaaataaattccttttctttataaattacccagttttgggtgttttgttataagcaaaagaaaacaaactaagacactccatccagtggttcatgacatttattgagaggaaagacaaggtgtattctatagctataaccgtagaattgcttttgttaagtatatttatgtttatacaagcctataaccttattttcctacatgagccgaaggtatcgtctaatggggttcttggcttaccccaagtccttctgataatattggagacttatagagacttttgaaaggaacacaacataatgaatggaaagagcaaatatcttgcctggtccctagctagtgacatgatattgtgcaaattactttgactacctgagctccatattattcgtctataaaataaggaagtgttcaattcagtaactatttcaatgttattgtctaaacagtttgattataaacaaccaagttacctaactgcagacaattttataattattttttcaccaatatgtgttatgttagatttctaatatatcaccatgaacaaatatttaaattctaaaatttgtatttgatacggtcagaattcctaaaatcagtggcattctctgactcaaagagttatttccctcctggctcattattctccatattaatgtttttaaaagatgtcctgaagtccttgcatctttctgggtcccaaccaacatctactgaacttgagtatttgaggatggaacccagaaatccgtatttttcacaagcattctgggacattctgacatgtactaaagttcgaggaccactaatctggaaataggtgtcactgagacattggaagattaaaaattgtgtacggtttttatgataaatgaagacagagttcagtcacagattcagttttttacttctccaaatgtgctgatttaaggtcatttataacattctcatagattaatttgaccctcagttagcattattatttattgtataaataaaattcacaaaatcaaactgaaaataattctcccaagattttgattactgctcgttttctttcctcttgtttttccctccagtcaccatttgttcttatttttaaaatttaatctttttttttttcttttttgagatggagtctcgctctgttgcccgggctggagtgcagtggcgcaatctcagctcactgcaacctccgcctcccaggttgatgccattctcctgcctcagcctcccgagtagctgggactacaggcacccgccaccacgcctggctaatgttttttgtatttgtagtagagatggggttttaccatgttagccaggatggtctggatctcctgacctcatgatccgcccacctcagccttccaaagtgctgggataatttaatccattttttaaatccttgttttaatgctctgtttcatttactgcccaaagaatggcaagcttgtagataaacatggcaagtgccatatttgcctgctttactataatctcagctttctgcaccttctggcttattttcaatcctatcatccattaataaaatcaaaggagtcatgtttactttgcacccatgtttttcttgatctctctttggcaagatttgatagtaatcattatactaattgctaatagtaaactgcttccccgggagttaaaaaaaagttcaggaatttctactccagtttatatagttgattgggttgagaacagcatgacattgtaatatctatataaacaatgcatttctcaagagtaatttgctcaccatagcatttggtatactatcacctctttaatcaattctgatttattcaacttttcttttattacaaactagtcaaaatattccccaaaatgtcatgtccaattcaggtatgttttgaatacactgcctgtcattgttaaaagcaggactgagatctgtaagagagaccagcattgtttgccaatgtttcaaagccatttaaaaggcaagataacttggaataaacagactgaatcaaaaaaggttaaagctattacaattcaacaatttaacaacaatattagtcattgttatttcacaataatatgttcagcatttctaaagtgtttctcaatcagaaaatgttcatgtatcttacaaaattttaaactactgatgagtcacacatagcaccttaaaaggaagtctggtgtccattgtgaaagataagaatttaagaggcagatgatctcccactaatgacatacatttatccaaaggtaaagctaagatagttctgaaagaaaggaaaggtgaaatgggatcctgatcttttatacagtacatcctctagccacaagggaaattccttttgagtctgtacttgggctcagcaggtatggaggggggctggtgggaccacaatgacccctttgaatggtcaaagtggttggtatcattaaaagagcaaccaaattggagtcaagagacccaaatgtatgtttcccaatccttatttattatttgtgtagccttgtgcatgtcaccatcttcctgggcctgtctgtgcccttataaaagatctatagcattagtgtattaacagacctccttagggggatttggtgagggaaaattaaggaaatatgtagaaatcactctgaaataaatgttggttatagttataattcaaaaaagacccagatcacttctttagagcctaaaagccaagtatggactagagtgccagagtgtctcttgtttgggctattgttctacatttacccacaattatctcagcaactattcatccccaagtaacctaactgggggagcctagcccaatgcagaggttacaggtccgtaacttttgtaaagccccctcacaaactaagatgtcagctgctgccaaattagttacaaagtatggaacccatccatgtgttcgttttttataaggcccagacccccattcagtttagtatctggaaaccctgacttttgcatgctgctggagaaaaaattatctccaaaccaatacctacctctggcaggaatgtgcattggaacagattgaggcaaaaataacccatttgaacacaatatgcaacagtgtatacaaatatgttttacggctggacttgagttctgattgttaacatgtcctgttttgtgccactcactcaaaaatgtgttctattaggagtcaggttctattcctgaccctcttagtcacgctgggcaaggcatttccattttccttagctttatcttaaccatcttggaatgtctcctcatccactctaccgtactggtttcaagttatgtcttctaagctaataacggagggtccacaaattaagcattacaaattgtactaactactgtattgaagtaggagtcatgaccccaaaccacttcttaaaatgctcctgaaatgaaaacgttgaaaggagtacaaatcattgcttcaaatactctaaaaactagttaccacacagcatatcttatttcggcatagggtacttatttagttttgcaagaacacatttaataccctagatatgcctttcttcagctataagcccactacatcctgtgaggagaagagtttgaagagcaagaccttctggctttcaaaagttagcagacggtcaggaattaccaatactgaggctgttaacattaacctaaagaaatcaaggcatttcaaattgttacataactaaaccatgttatttattctttgtacacaaatacatagtgtcagctgactttcattaggaatgtggtagagacagctagaggacaagctacagaagaggcccaagcaattgccagtacaagcaggcacgatgcaaagcatttctgcctgtgaaaatggacagaaaagtggctggctttagcgcggggaggacgaggggagagttggcagaggcagaaaatgtgatggaaaaacaacagagttattttccccatgaattactcttgcaggttgtgtaaactttcaagtgaataactagaatatggcttatgatgtaactgaacagtacagaagtctgcacagagaaagtcctgttcaaaagagaaggaacacaaccactggtgaaagacagctcagcagaaatgatatggaagaggggaagggaagtgctgggtagaggaaggcatggtcccaggttaggactccacccccacggacctaggtgaggacaggcatttttgttttcctgcccaaatgctacatttcccaagaccacccaggcccccatcctgtgcctataaaaacccgagaccctagcaaggcagagacagaagcagctggacgtggagaggagcacattggcagaggaacacacaagcggctagacgttgagtggaactcaccagcaggcaccagcaggccactgacgggcaaaacaacacagagtttggctggggcagttggaggagcgctcggcccccaagcggcccaacttatggggaaaatcatctcccttatggctcccccatctgctgagagcttcttccactcaataaaaccttgcactcattctccaagcccacgtgtgatctgattcttccactacaccaaagcaagcaccccaggatacagaaagccctctgtctttgccacaaggtagagggtgtaattaagctagttaacacaagctgcctttggatggctacactaaaagagcaccctgtaacacatgcctactggggcttcaaaagctgtaaacattcacccctagacactgccctggtgttggagccccacagcctgcccgtatgtatgctcccttagaggcctgagcagcagggcactgaagaaacgagccacttccccatcgtacaccctgcgagggggacaaaggaacttttcccatttcacctcctctgtcagtaccaagctggtctgtatgaggacggcagtctttgaaaaacaacatattggccaggcgtggtggctcacacctgtaatcccagcacttcgggaggtcgaggtggacagatcacgaggtcaggagattgagaccatcctggctaacacggtaaaaccccatctctactaaaaatacaaaaaaattagctgggcgtggtggtgggcacctgtagtcccagctactcgggaggctgaggcaggagaatgacatgaacccaggaggcggagcttgcagtgagccgagatggcaccactgcactccaccctgggcaacagagtgagactccgtctcaaaaaaaaaaaaagaaaaacaacatattggtgcgattctgagcttcactgacaaagtgaaattgactacctctctaactgattaactatatctcaatttcaaatactgaccacaaaggtagaatctaattatgaactgacatattaagacctaggtgcttaaatggtaggatgtacttattctaggcttcctgtgctatgacaggcttttactcttatgtggttaggtatgtttccagggacatgcctcggtgaatatcacacatggaaatgtggttaataatgagccccttctgtgatggaattattattcaaggtatataaatttagaaatacgtgaggcttaataaaacataacgttattgagaagtaaatctcccattgagcaaatcatacattatttcacataataggtccacagatatttttaagagagtgaatgaaaggccatgtagcctgctgaggaacagtatgtccctaatgtatagttttatatatgtgtaaaacctaggagaaaataaagcagatttccttgcagaggtagcaaaattgtcagctacttggactttcagggaaaatacacagtatttgaagaaaacaatagtggagtcagtgccaagctgatgagtaaagtacagaaacacattataatggagatgagctggtttaaataagccctaagacaatcaaaaaattatgtctccactaaacaaaatttctatcccacatattaagactgtgacacaaatagacaaaagagaggaaatacatgattatagatgcttaattcggccaacacaaacacagcatatccatttcaacactgtgtggaattattcagcttctagctaggggaaaaaagaaaaaaagcatcaggaaaaacaaaaacaaaaacaaaatcaaaatcctttcctacagttccctcaaggcaaccagaaagtgaaacttaattaaacaagtgaaatgtaattacctaatgcttaccgcacatggtgctgattttcacttcacattctaggttcattattaacgggctggtgctgcccagaggtaggaataaaaattctatgtaggggtaaccattggcagggagcaagagaaggaaagtgctacctgttctgacctccctacaggggctcaattcctccagtcactagtttcagctagtcacacttcaggctgagactgtgagtagagtctaattatgggagggctgtccctcaagcatggtgggaggtaaccccactctctggaggaagctgaatctgaatctggggttttttacacctctcaggacctcactgtgattgctcactcagcccacttgctattttcatgcactgtttagaacaactcagcagtttcttttataggaagaggcatttgacataaggcacctgttgaaacaatttgaaatgtgatttcatcatgactctggaaacatggagatggctttcttttgttgacaggtacatacattcagaaccagaaggatgccatctctgctctctatgatttcattttattatgaagtttgatgctataatggtatttggatatctttatttaactttgtatttccctttctaccatagcatctttaagcatacatcttaaaaagtaggctgggtgcactgactcatacctgtaatcccagcactttggaaggctgaggagggagagtcacttgagtccaggagttcgagagcagcctgggcaacatagcaagaccctggtcttgacaaaaaataaaataaaaatttcaaaattagccaggtatggtggtgtactcctgtagtcctagctactccagaggctgaagtgagaggatggcttgagcccaggagtttgaggttacagtgagttatgatcacaccactccagcctggtgagagagggagaccctgtctcaaagcaaaaaagtaagtaaatatttttcctacctatgtggcttccaaggaacaaacatttgaaaaatcaaaaaccctacttacaaggaaaattggtatatgatatggtttggctgtgtccccacccaaattgcatcttgaattgtagttcccctaattcctatctgtcatgggagggacccagtgggaggtaattgaatcataggggtgagtctttcccatgctgttctcgtgatagttaataagtctcacgagatctgatggttttataaaggggagttcccctgcacacgatctgttgtctgccgccatgtaagatgtgactttgctcctcatttgccttctgccataactgtaaggcctccctcactatgcagaactgtgagtcaattaaaactctttcctttataaattacccagtcttaagtatgtctttattggcagcaagagaagagattaatacagtatatacatcaagcaaacactaaattgctcgaataaatgcatatttggattagaataaatctctaaaactgagaaacatactcagaaagttatgaaacaatataatgttggcatcataatccacttcattcatataccatggaaatgacttggttatttttattggaactgctagagggaatcaaatatgcacagacttttgagaaatttcaagttgcctgttattgaagatgattaagacggatgacttcatggtgggcatactgcatcaggtaagggattgaactaggtttcctcttagctcttttccaaagtgtctatggttctgtgaatctggtgagatttctatggtagaaagtcacatgaatcatcattgtaggtttatgcttcagctctccattcagcctaaatagctattgtatgttatgttcctgagaaggtattaacatggttgttactgaagggaccaaggctatttccttctgtttccttccactcactttggcatgtcctagtaagtatatatataatccattaaaaacctctttttgctttattttttgaggtacattctttttattttggggggaaatgtcttgctctgttgcccagcccagagtgcagtggcacaatctcagctcaccgcaacctctgcctcctgggttcaagtgattctatgcctcagcctcctgagtagctgggattacaggtccatgccactatactcagctaagttttgtattttttatagagatggggtttcaccatgttggccaggctgacctcaaactcctgacgtcaagcgatctacatgccttggcctcccaaagtgttgggtttacaggtgtgagcctccatgcccagccttgaggtgcattcttcatttggcttccaggttgttctccttcctcacttaccactccttctagtaccctctgggagtttctatccccttgacctctaaacgttgggagccccagagctcagaaacctctcgttaaacctcatggctttaaatatttaaattagcatagcactgatgactgacaaatgtatgtctttaacccagacatctcccctgaactccagtcatatacacaaatgatatctccttagatggctaagacttgacatccaaaactgagctcttgatcttttcctcaaaactcaatcctccccagttttcttatccttagtaaagagcaaccccatccttgtagctgctccagtaaaaagacttggcatctaggttgattactctttttttaaaccttacatcctatccactaaaattgctggagtctctaccagatatccagtatccaacaaataccacttctgacactagcagtctgttctgagataccaccatttcttttctttgagatggagtcttgctctgtcacccaggctggagtgtagtggtgcgatcttggctcactgcaacctttgcctcccgggttcaagcaattgtcctgactcagcctcccgaatagctgggattacagacgggtgccaccacacctggttatttttttgtatttttagtagatatggggtttcaccatgttggtcaggctggtctcgaactcctgacctcgtgatccgcctgtcttggcctccaaaagtgctgggattacaggcatgagccaccatgtccagccaccatttcttattaatacaatagcttcctatataatctccttaaaatttccctcctcctgtctttttaaaaacacaacagcgagaatgatccattgaatacctaagtcagattatgccacttctctgcttaaaaccctccagtaccttcctgtaatggttaacattaactgttaatttgactggattgaaagatgcaaaagtattgttcctgggtgtctgtgagggtgttgccaaaggagattaacatttgagtcagtggatcgggaaaggcagacccaccctcaatgtgggtaggtaccatctaatcagctgccagtgtggctagagtaaagcaggcagaagacgttggaaagagcagacttgctgagtcttctggcctccatctttctcctgtgctggatgcttcctgccctcgaacatcagactccaaattctttagcttctcgactcttggacttacaccagtggtttgccagaggctctcacacctttggccacagactgaagtcttcactgttggcttccttacctttgaggttcgggacttggactggcttccttgctcctcagcttgtaggcaacctatttgtgggacttcatcttgtgatcctgtgagtcaattctcctaataaactccccttcaggtatacatatatcctattagttctgtccctttagagaaccctgactaacacagattttggtaccaggagtgggaaccagttaagactttgggtgactgttggaagggtgtgattgtgttttgaagtgtgaggacatgagatttgggaggggccaggactggaatgatatagtttggcttggccccacccaaatctcatcttgaattgtagttcccataatcctcacttgtcataggagggacccagtgggaagtaattgaatcatgggagcagttacctccatgctgttctcatgatagtgagcaagttctcatgagatctggtggttttataaggggcttttcccccactttgctctgcacttctccttgctgccaccatgtgaagaaagatgtgtttgcttcccctcccaccatgattgtaagttccctgaggcctcctcagccctgctcaactgtgagtcaaataaacctctttataaattacccagcctcaggtatgtctttattagcagcatgaaaacagactaatacacttcccatctaattcagaacaaaagctgaaatcttttcagtggtctacaaggccgtatgcaacctgcctccaagaccgcattacttctttgatatcaattcccatttctctctccttcgcttactgctctgaccatatgggccaccttgttattcctagagcattccagggatactcctgtctcagaatgtttgcactttttcttcagcctgcctaagaatgctctttcccctgatgtctgcttggtactatcctacacctccttcaggtccttgctcaaatgccaccttctcagtgaggcttctataaccttcctatttaaaactgactcctttctctgacttattttataccacaacacgtgccaccatccaacatcctatgcattgtacttgtgttgtgttgtgttttctctgctagaatgtaagccccatgagaacaggaatttttgtttgctcaacatgtgcctactacagtgcctggcatatagtaggactcaataaatatttgagtagataacatttaaatatgcttaaatttcaattgttacatatattgaaacctcttggtttacacgcctcttccaggttaagggcttctgtgatctcacaagaggcatccaccttatcagggtcaaatttttcagacatttttcacataaatggtcaactgcctgaacctaaaaagtttttagaaaacaggacatattatgagtgggaaacaaacaaacaaaaaccaacatatatttaaataccttccaagaaaatctcagaagcagcccaccagatttagatactatatacttggctatgttgttttgcaaaggctggaaacataaggaagttctggaagtcagcaaacaccagtatttggccttaaaatgatttaacacacacaaaaatggcactgtgcctttggagacctggaatgcagcattacaggttttctccaaaacagtttcatttacttaacattactctgaccctttaacttctaacttgctgtacaattaagctatttaagccttcgacttagtgctctttgtgctacaatctgggtctaaagtgaagcaaaaaccaccctacacctttctgttttacttaaggttattctgtcccatgaagaggtttacatatgcaaattttagcaccacatctgtttagcacgcagttgtaaggctgagactatttctattttactttttcattccataaacatttattcagcccctactatatgtgtttcaggcacagagaatcagaatttttttttcttgcctgtttcaatgcaaaaagttcctacgtaatgctgatcacattaaagtttgttaccatggaaacaagaggacagtcacaatcagaactggcatcaagttgcattgaaagtaaggtactgcttctgacagcaattgaaaacaatctgaattctgtactgtttataaatcaaggcaataatcttgtctgtcttgcacagcctttcttatttccccataaaagttgtaaatgacttttggaaaaaaagtttatctcttgaaacgtatttttttttaaagttcaaattagattaaaaggaacacaatttactgggcttcaccaatatttgacctgggaaaaattaggctaccccaaaatagtaatttcatgcaaatgaagtaatttactgtcatatgtttaaacaaatggttgttaattttggaactttttttcttcttttgtagctttcatccttatccttgtttatcttattcatattttttctttctattgcaagttattctccatagtgctaaaaagaaaaaagaaagcaaacatcatcggaaatatgaataagggacctaagttagagtccagtttagtctatgtagtagttatgtgacttagggcaagctattttatgactgtgggactcagttttctcatctgcaaaatgggggtgatactccctaaattattgagatttaaataagacaatttgtaggatgcctggtatataacaagtaaggagatagccagcctccatatcaaatttgtgatataaggcaagatgcttgcctttcccaggccttcatttttcatatatcaaatggagatttaaaacttttcatttactaaactctttggattgttgcaggggtcaaatccttatttttacatttttacaacatgtaattcccattcattataagatagtatcatcctgttatcctgtctcctttcttagttgcagtctctcttggtattttcatttattcctagttctttttcttgtttctttttctttttccttttccttttttttttttttttttttttttagaaggagtctcgctctgtagctcaggctggagtgcagcggcgccatcttggctcactgcaagctccgcctcgcgggttcacgccattttcctgcgtgagcctttctgctagctgggaccacaggagcccgctaccacgccctgctaatttttttgtatttttagtagagacggggtttcacgtgttagccaggatggtctcgatctcctgaccttgtgatcggcccacctcggccttccaaagtactgggaatacaggcgtgagccaccgcacctggcccctacttttataaaggatttctcatctttttctttatagacatctttacacgtctctttctctctactatagctttcctgttgttgtatttttgtttctctgttaactataaagttttagagtatttcttttatttgtccttattccttatgaattatgtagttatttctattatgaaaactttaaaaaccagaaatattaaattaggtattaattaatgtttaattataggtttagttaaacctattaattaattaaactattactaatgaaaaggctagcaatgtggaattgcattggaaaaataaaacataagttgaaacagatgctgctcatgagctatatagctcatatgtctaactcttttatatctggattagatgtttaatttggaaaaaaatgcattctttttgtaaatattcaaatattgctaaaaggtctaagaagaaaataaatatcacctgaatctaataccctagagatcactactgtaaatagtttgatgaacttgtcatgaatctcaatgtatatatgtgcatattagatatgtataatttcacataaatgggctcatttatacatattttaaagtctacttattcacttaatttattgttgcactaattccatgttaatgtatatgtattgtatctcaattttaatggctgcataatattccattgtatagatgtatcataatatatttaataaattccctatgggtggacatttaggttacttgcccctttctgctataataaaaatgctgcagagaataacctttgtgcccagatccctttagaataatggctaaaaatataattaatgaatgagttcttaaacatatcctaacttttgcattttcttctttatccaaacactaaggaattttttttttttttttttttttttttgagacagagtctcgctctgtcacccaggctggagtgcagtggcgtgatctctgctcactgcaagctctgcctcctgagttcacaccattcttctgcctcagcctcccgagtagctgggactataggcacccgccactacgcctagctaatttttgtatttttagtagagatggccgtgttagccaggatggtcttggtctcctgacctcgtgatccacccgccttgacctcccaaagtgctgggattacaggcatgagccaccacacccggccagaatttttctttctttttgtacaactcagaccatgtgacaacttaaagtgaaattcaacatcagtgctgttgtaggtaaaactgcctgaagcaggacacttgagaagtgtagaaagctttgtttttccattaattttccctaagttaaacattcctaccatagaaataatagcacatataaaaatatttccttatcctacaaatcaataaaaataaagactcttcagctggtctctatgtctgttttaacttacctacctaattatatctattataattagccatatcatcaatgtcgttagctcttcactatgggtaagagctaaatattttaacccatagaaggtcctacttccaagctccaggaacttacattccttcatcaagagggttttagaacgactggaaaatgtctagcatggtgagtaggctaagtaagaatgttctagccaggaagatagcagggaaatcagttttccctcacatgcttgtgcctgaggggattttgctatctcatgtccatgaaaacaggtacagaatctataattctcaagaaaggaaaaaggtaaaataatatcaaagcagctaccggtttcctggtccattctctacttctagagaaagcagtaactgacagaataatataatgtcagagacttttgtttcctttttctccttcaaatggatccactttactgagaggaaggctatgcacattcactcttgctgactgataactctgaactgtgctgttacacccttgccatctctctctcttggaaaagatggttttctgcctatagagaggacaggaagaacaatttcttatccttgtcagtgcccaacacattttaaacttaatcctaaaatctaaaacagcaaagtcacagaggaccgcatttaaggaaagaaaagtccttgtctgtctttgaacagagcaccctcaaaagctgagagtgacaccttagggtcatgccagcctgtaccgacaaccatagttccaaggccaagtttaggccaaagaagattttataattgaggcagagcataagaactagctttttggatccacgtagttaaatggatccacacattgaaatggcaatgtctgtgcctttaaaacaccaatcaggtcgaagtggcttgcgaaaaggctactaaaaaacagaagaggaaaaaaatgtggttagctccccattttcataattatttctcccatttcctcctctccatagcttctcagacccaaaaaaaaaaaaaaaaaaaaagcttttaatccttgctctgtgcagttatagtggaaacctaaaggaaacctaaatctggatagtactatgataaatattgtaagatttatgcactcatcccactgatatttatcaagtgtttagctcatacgtgcaaggtactatctaaagccgagtgcggcaggcctctgtacacagagcaggattcatgctctgtaaaaactcacagcatgaaagataagctcagatatttatgatacaaggcaatatatttaaagtgtcagttcagtgccatactcagtataaaaaagagaggagtcacccacggaatgtgttgagaaaaggcatgtagaggatacaccatttttaccaggccaggaactatagcaaacttaggacttctgtatctcgatttttttttcttttattgatacataatattttacatctttatgagatgcatgagtgtttgttacacgcacagaatgagagatgatcaagtcagggtatttggggtatctgtcacctcgagtatttaccatttgtatctgtgggtatcacttcatgtcttctcttccattactttgaaatatacaaaatattgttgctaagtacaatcactgtattctactatcaaatattagaacttactgtccaggcgcggtggctcacgcctgtaatcccagctctttgggagggccgaggcaggtggatcacctgagatcaggagtttgagaccagcctggccaacatggtgaaacaccgtctctgctaaaaatacaaaaattagcagggcgtggtagcaagcgcctgtaatcccagctatctgggaggctgaggcaggagaatcgcttgtggttgcagtgagccgagatcatgccactgcactccagcctgggcaacagacactctgcctcaaaaaaaaaaaaaaaaaaaaattagaactttctaaaataatttaaaatggaataaaagatatcttagaagaattaaatcctgaagtactaatttagtatcctgaaaaagttaataaggtaaacaaaataaatggcctggcacatagtaggtgctctagaactgctaaaacccttctgtgggaacttttttttttttttttccattctccagggcagtgattctcaagctagatacacaacagaatcatctggaggacttgttaaaacagaatgctaagccccatccccagtctccaattctgtggatctggggcagagtccagtaatttgcatgtgtgatgccgctgctgctgctgttcttggaagcacaccttgagaaccactgcctggggaacagcttagctgctatgagaatctgattctgtgttcatattccgtatcacagatagctcttggcttttcaattgtggtttctttttttaatgtcttactaagggggaaaaaaaggaacgccactttatataaacctgaccttttggtaagcctgggtagtaacttcccatgtggagtaaattaatctctttcatgcatgcctcgtgctctggaaaaagtaaaacagattgtgttagacatttaccaagtactttttctgttggtggtcactgccctaagcctatcagaactggtttctacccttaagaagcttacaatgtagtaaggcggacatcccaacaaaccagacattggagttcattgtgtgaggtgctatgatggattataagacattatgattgactgagtattatgaaggggtgaagcaaactcaagctggcaaattagggaggaggtagatcacacaggctttcctaatgggattacttatgactcattgagtagtgaaagatgaataggactttactaaacagaaactggaagggctttctgggctaagggaacagcacagaagcatcaaatacactttacctttctagggctgccagtagtttaattcagcaataccacatcacaaaggtctttgtgtgctttgctaatgagtttgaactttatcataaaagcattttacaaagatcacactggcagctgcattttggaagggatttgcctagaggtaggataactgcggggggtatgtctatagcaataaaagtgagaaaatatgagatctgaaggagctaacattgtggcagtggcagtgggtataaaggagaagggaggactagaagagatatttaagatgcaaacaatgtaggaactgggtgattatagaactgaaaagtgagtgagagggaggaatccatgagaactcacatatttctggttaggataaaagactgattgactgacatgaagactacaagagaaaaaaacagacttggagttgaaacttcagtttaggacactgaaactgaatgatgtgtcattcaagtggaaaggccattaggcagttagatatgtaggcttagagcacaggagaaaggtcttaaaaccctgggcttatgggacgttaccacggagactgcacagagtgagaagatccattttaaagctgatgatgaataatattttcgttataaggagagaagcaatgttaggggtgtcttcccattgctggagtgggtcatttgcagtatgcagtgcataaactcacaggctgtccttatgatgaccttttgttcattcttacattcagtatacagatgaacaaaggaagtattttatgtcttgtaaattacaagggactatgcagtatgtaagggaagatacaggagagtaagggaaggagaaagagggtgactaacaagcttctcagagattagccaagaactatggcattgaatctaggtctctcctgtcctcaatttgacactctccactcccctgacatgttttgtattaaaatatatttttctttttatgaacatgtcatacctatggctcacctgtgtccttgctaacctacaggtttggacaatctggaattggcagcatgcatgactgtggagctttaaagccaccctcctgagagaagagcagctgactcatgtacctcaccatgcagatgagggtgtgttataacccacagtgtgtctgtgtccctggatgaactgagcactttataatggagtttttctgcatctcaaaaagaagtcacagattaaatggtaactgcaagagctcatttctctatttgagtgagtgctttatcaaaaaaatattttattcctgctgctttaccacagggtcaattcaagtctaaatgaatctggcatgtataaaatatatttttatatagctccatatagagatatagctctacacagccattaacagactcacacacaatcattcttttattccaggtgtgaactgctatgctatttcacccagttcaaacacaggtcattggctttcaaactaattttggaaagcagacactgtgtagttggtaggtggaataaaatgaaaacaaaaaattaatatgcatggcagtttaactagctgtgtatctctcatggaaagggggtaatagtctaaaattatttactcatttttttttaaagtctttaaaagaaggcaatgaattgccagtaatttccccaccttaactcatggtaatttgtttcctgctgggtgaaaacgcagggatcttgaaactgttaatgaactttctttctcctgatctgtacaatgtcaaattcatttctttttttcttacttcaggttttactattctgttttgtttgttccatttttgtattttttcctgaggtcagggatgattctatggaagcatgaaaatttgtagttgaaagggatcttagaacttcagcaagatttgtgatagatggtcaagtgggtctgggctcgcaccctccctaaggtgaaagactcactgccttaccccacagctatttcactacttacagactaccacacaatagccagggtgctgccctatttgcaacatgaactggaacattatattgggacataatgatgagtggtagctaaaagtcctttccctctggtgttgttatttggttaaattgatttacataatgttattctgtggtataaacctttctcatttatctcatatatatcccattttaagctataagctcccagaggggtaggtacttcatcattacttctgtactcaagtattttgcatatctttgatacaaagtaagaacaatgtatatgtatatcagtttaactctcagatgaatgaactaataaaacttgtaacagtattttccaatgtagtgagtacattaagcatcattaatattaaaatgcaaattaatgcattatttgcaagttttcaaatcatgtgtacttaagaattttcttttaaaatgtatcaaaagactgaacattcaagctgattatcataaaaagtgtatgtatgggggtaatattcaaaatatttaacaacccagaagaacatgggagctgtaattcccacaaatcaccatgtgaaggtgattccagggaagagtcagtcaacagagaatagccactgatggaagggaagtggggtctggtggcaggtgatggatagatcactaaacatttgtccaagagagtgctagtgttgccgctaggggtgaatatttctgttggggtccaggtctgctctggctggggaggtgtggggaagcaagcaggaatggggctgcaaaaggctggctagggtagcccacagtggtatctgcccaggaatccctggggtctgggcagggtagtgggaggcactggttgagggaaaaggaataatagtttttttccctgtttgtcagctgagttagcagccctggttttgagaaatattaaaatatgcctttgatttttggggatatcaatgagttttgcaatgaagtagaggggatcaccagtttaagacttactgatcagtatgggcaacatggcaaaatcccacctctacaaaaaaattaaaaatttgctggatgtggcagcatgcacctgtaatcccagctactcaggaggcagaagtgggaggatcactggagccagggaggtcaaagctacagtgggctctgattgtgccactgtactccagcgtgggtggcagagcaagacctgtctcaaaacaaaacaaaaaacaacaaaaacaaaaaagacctgatctactgagcaaacaaactaccatcacaaataaatcagaacttgaaaaataatgactgtaggccaggcgcggtggctcatgcctgtaatcccagcactttgggaggccgaggcaggcggatcacgaggtcaggagattgagactatcctggctaacatggtgaaaccccatctctactaaaaatacaaaaaattagctgggcgtggtggcgggcccctgtagtccaagctactcgggaggctgaggcaggagaatggcgtgaacccgggagacggagcttttagtgagcggagatcaagtcactgcactccaacctgggcgacagagcaagactccatctcaaaaaaaaaataataataataataataataatgactgcatgtatgtacttggcatgatcattatgaaggcattcttcactgtacaagaagagtcacaatgaaattcttttagctcaagcaatttgagtggatttaaattatttttcagtaaggaacttggtttcagatacaacttttcaagaatatagctactgagtagaacaaagtatgctgatgtccactctccaggtcttcaaaatcaaagcagaattgaaatctgcggcaatttttctaattttttagttttatcttgaagctgtttgtttaaattatctctccatcttactgttagattagaagacatactttttgccagaaatactcacttcaattgcacaggaaaaagtgaggtttcttgattcaaattagatagaaaattctgttttgacaatatagccaaggtcagatatgatttccctacaatctctaatcatgttgaattttataatacaagtttaaatgacctcaaaaaatttgtactacatttcagaggcaactgtaacttccttcatgaacattagcaaataatcttcaaaaattggaatgtgacctcagtcatcctcctccttctcccttccccttttcacttcaaccttaatgtacacacttgcaaattttcttccacttatattttcctttaaaggccactttctagcagacaattcaactaactgctgtatttttccatatatgatgccagggaatagaaacaagtgagatagtttcttatatgatataattgtttccattaaaaactcaggaaagcaggaaccaatccatcaacaagggcgaatgaaagatcgtgtaatccacaaactttaacttttgatcacttataaaatttaaaactaaacaagccataaactaaagtgatgttaactgtcaaggtgtgggggtttttctttttcattcactgcagacctgttaaactttgtgctctctacagaccttgctgtccacaccaaaaatgcaattacagttctccttgtctattttaatctcacattagtttattaaccagaaattaagtaagggcactcactctttagcacatttttttgtagatgtgtgagtttaatactgttttctacaacgtttattagaacacttgacatgggaaatagaagaatatcaagaaaccatgagatgccattataccaacaaaaacaaaatgcaggctttgtgtgctacaatctttttctccaaaagtgaaaataaacactaatgaatgattccttttgccttgaagaactaaaaatttcttagttgaagtatctaactggagaaatctttaaacatgtgagaaatgtatctggggcctacaatttaaagagaagaggaacacattaagtcatgaacccactagaccaaccaacatttgtcctctacgttctgaagtccagctggattcacaagggtcgctgatcattcctcattgagctattatatgctagtgattcactcctgctttcttttacattttcgacctcttcctctctacttgctgatttacctctgctttataaaagtggttattttaacctagaaaacaaaaatttgagattttttggtctctaactttcttctaatggacgactttcttctatataccatatataagttatttccacttcctcatctcctacttaatccacaattgtcttcctttttcaaaactttactgaaagtacttatcattttgccctctagataatcaactatatccttctatcaaacttttctttcagttctcatcctcttacatctttctgctgcatttgagactatataatatcacttccattcttaaaactcctttctcccttgccaactggctgaaggaaagtcgtttctccactcatacactcaaaatgtagccatttcttgatgtgtaccactttcaatttgtctgtttagcaagatcttccactcccacaaatttcttcctcaaagacatatgtgtaatttcaaaatcactgttcctgaatatgaatcctctccagaggtgcaggtccatattttcaaccacccaataaacacttccatttggatattttatctcctaatatctctaacaacatagtccgtatcaaacttatcaccatcttcagcctgtttttcttctgttgcttttgcttcttttaatggtttcatctttccaagttaacaatagtttcttctcattggttctcaacactgaattgataagctcttttccacaggtgagatttggaaacctaacagtgaatctgcaattcttctttatgattgcaatactgggttttgaggtgtcaacatcagtctgatggtgctaaagtaactgtgacaccatttggtttggcttacaaatagtttctgagctcctactgtgtaagaccagaactctgctagcaaaacaccattagtttttcaggaatattagcaaccgcagtttagaattgatgaaagaaaaatatgaatttggatcaatgtcttatctttcttacaaaatctccataaatattcctctcccatgaagaatcagtctcttcagttactctaactcatcactctataataatatttactcagaacctgtaatgtgctgaacattctaatcactttagaaatgttttatatggtaatcctcttcactatcctatgaagtactcatcattgattgttgaattgtgccgtatatggctggatggagttgtgcagtgcatagtctatgcaaccatatctcttgccccaataagacccatttcacagttgaagatactgagccacagagaaaggttaaggaacttgtccaaagtcacacagctactaagtcaggattgagtgagtattcaaaccatgaaaaccaacattttgacatgactctcttctcttaacagatatatgaaaccacgtctactcatatttctactgtagcacctattgtaaatatttgcctttgtgcttgttcccttacttagaatatgaatcccacgaactggctagccatgtgcagaaaattgaaactggaccccttccttcaaacttacacaaaaagtaagatggattaaagacttaaatgtaaaatcccaaactttaaacaccttagaagaaaatctaggcaataccattcaggatataggtgcaggcaaagatttcataggaaaacaccggaagcaattgcaaaaaaagcaaaaattgacaaatgggatctaattaaactaaagagcttccgtgcagcaaaagaaactatcatcagagtgaatagacaacctacagaatggaagacaatttttgcaatctatccatctgacaaaggtctaatatccagagtctacaaggaacttaaatttgcaagaaaaaaaccccaaacaaccccattaaaaagtaggcaaacaacacgaacagacactcctcagatgaagacattcagggggccaaaacacatatgaaaaaaagctcaacatcactgatcattagagaaatgcaaatcagaaccacaatgagataccatctcatgccagtcagaatggctattattaaaaagtcaagaaacaacagatgctggtgaggttgcaaagaaaaaggaatgcttctatgctgttggtgagaatgtaaattagttcaaccattgtggaagagagtgtggcaattcttcaaagttctagaagctgaaataccatttgacccagcaatcccgttactgggtatatacccaaaggaatatagatcattctattataaagatacatgcatgcgtatgttcattgcagcactattcacaatagcaaagacatggaattaacccaaatgcccatcaatggtagactggataaagaaaatgtggtacatattcaccatggaatactatacagccataaaaaggaataagatcatttcctttgccgggacatggatggagctggaagctgttatcctcagcaaactaacgcaggaacagaaaaccaagcactgcattttctcacttataagtgggagctgaatgacgagaacacatgaacacattgcggggaacaacacagagtcagtcctgtcggagggagcagggggagggagagcatcaggaagaataactaatggatgccaggtttaatacctaggtggtgggttgatctgtgcagcaaaccaccatggcacatgtttacctatgtaacaaacttgcacattctgcacatgtacccctgaactcaaacattgaagaaaaagaaaggaataagaatcccactaggggaaaaagagatttaagttcttaaactgttagtattagtatataagaagggcctagaatcttgcatatagtgggttttcaataaattctagctattatcattctttttatcttttttttttttttttacagatttgtcacaaagtaaggtgctaattaatgtttgttgaataaattactatgccaattccccaatgtgtacaaaatgaatatacatatgacctagtctcaggaaaaatgtatatgtggagaggatgaaagataatttttttccatataagcttcctcatctaacctgtttcatatccagtttctgggacagaaattgattaaactattctaacgtggaactaagcaatttaaacttatatttacatggtcaccatatcagccggtgatctcaatatggccctcaaattttgctgtcatggatagttgtatattccagtgccagaaaaaagtaacaatatattcacgagagagcagcctgatgcgctgctctagagatgaaaataaattgatataaatggagatactgagcaaaaaaatcagcagctagcacttatcagatgggaagtgaaaagatgttaactgagcttacaagaatgaagaatattgtcatcagatagttgtataaagaggaccccacaaaacctgttattataagagcattacatcatgggagaaagtgaaaagcaatagctctcttaaatgtatttgattaataacgtctgctaaacttctccttaacaaatgaccacagtcagaaatatatatgtcccaaagagaagctgatggtaactaagaggccctttgggggaaattcatctgacaaaacccctctggaggatgtacaggggattatgtgaatgcctatgtctacttctatccttgcatggtataacttttttaaagtaaagcaaagctcaaagtttgatgccttactaatggccagtgtcttgccaatggtcctttgattacaactggcattctaaagcaaaaataaactaagaaaatttaatttcatataaatgtattatagagacatctacttttttgtcttgtctttagttttaaaaaaattaagagtagaattggtaaatacaatatttatttgagaatcatcatggtcccgacagacaatctagcgttaagtagattgttctacggtaattgaactacaaaacaaaatcattaaatactcagacaccttattaagtgaaagaatcaagcatcaacattatctttcaatgttctcattttcataatactcttctgctacattctgttgcttgatcccatgttaaaagattaaatggctaaaaagttaagaaatcccaacccttcattttaatactaactcatagttcataaaaggaagggcttatcagctgaatcattaaatacacgttgcttgcaattttgtgcagtggaacggagacactgaatcccaaaagggccctacataaactctgagagtaagcgaaatggtatcctgatacactttcaccatgtcactgaaataattaagttgggtattataaatctgaatgacaaatcttggaaaccacctgaaaaaccacaggaaatattctatccttgttcaatatatggaaatagttgatgcaaaaagaaacagaagtagaaaaaaattagatctcagagcaaatgtacaatattttttaacatgatcagggtaactgttacttgaagctggatatctgctgattttgcagattatgttaattggctactatctagaacaaggtataaaacagataaatgggaggtcgaggcgggtggatcacctgaggtcaggagtttgagaccagcctggccaacatggtgaaacccagtctcttctaaaaatacaaaaattagctggacatgatgacaggcacctgtaatctcagctactcgggaggccgaggcaggagaattgctggaacctgggagatggaggttgcagtgagccaagatcgtgcccttgcactccagctcgggtgacaacagcgagactctgtctcaaaaaaaaaaaaaaaaaaacaaccaaaaacagataagcacattttccaaatgacctgtaggatgaaaatcaaactgccaagcaacaaatggtaataccattattattcacgtaatattaattctgactcttcattagcctccaatgtgaatttaaattaaggtataaagctggtaaatatgtggcattcaaacacttgtgtattatacatttaaattaattttaattattttcagaagcacggcgaaactcaaaaggtttttctactatacattaaattaaggtaattctggaatgatgatacctaaacacagaatcacatctttaaagtcaaaaatataatttttctactaataagccaagccagcacatgttgaatttttaatatgtatgctctgataattaattttgtatttttccaattacatggctatcgcagtgtacttagagacagaaaaccgtcatggggaaaggggaaaggtgaccatggtatgtgtaaagcctgtttcattttctaaacatctttgagaactatgttaaattttagtactttagtcatgaaatgacagaatgatagaaaaagacttggagggacatcaaagcatttagttctacctgaaacttggctttctaaaaatacgactgggaaaaagactattgtgtttagaccacagatttttagttaaatctttgaactctatgcaaagtctaagtaataccacttttatttaactcttcagtctatatagtcttcaaggataactgtgcttttatataattatccggattacaaatttaactacaataggcagactcttattgtcaaggaacagatccttatacttaaacattgcttagaatcttcgtaggcacttcataaatgtttgcagaatcccatataactcacgaatgaatgagtgacctgcaactgctgatggatttgaaatagagtccagatttttaatgcatctataaatgtaactttcctaacttgattctgtgagaagtctagaggcacctaatttaagagaagaaaatgatatgtttataatcattaaacatcttgctctgggtatttatttaaattaataaaaattcataaacctagctaacctgcgacagttttaagggaatatgtgcaatacaaagtgtaggtagaatagagtagtatgattacgtttacttttagagtatgtattttatttggcatcatgtatttattggtgtgcctaacattctcagtgaactgggtatacacatcatacattcaaaggggcagaatgttctctcttaaaaaaaaatcattttaaagtcttttgattaccaaatgcccactttttaatgtaaaactactcaagatgttttgaagggactgggaataaatatcaactaaattaatcattacaatcagggaaaatcagttagaaagggccttagagatcctctaagctctctcacttttctctcactgctttttataagcagtgtatttttattactttgttagccgttggcagagaatgaacattgagtatctttggacaatttcttcttaatggctggtgcctattttgtcctataaaatcatgtggaaatgttggtacttttggcaatatcttactccttgagggcacttaatggtcttcattctccccaaagcttctctcactcccaggtaataagctgaactctaacagagatacagttactctttcaatccagtagagaccacttgatttaccactctactgcacaaaatggtaccctggtggcttgaaagagacaatggggagaatgtggctcattaaatagtaattgatgctgctgctactactaatgttagtattgctgctaaaataactgtgttgcttctattctgcttcttctatgtgattgagaattagcatagttcattcccatggaaggtcaattgacaggctagcccagaagcattgagtagccaaactgattggtgagacaatcaagatttcaagatctcatatgatccacattgccagaaccacattctacctccttaatccacaaatgcattataaatccttacaaatcctaatgagatacagtttcatgtaagtaaattttaagatatttgatattcccctttgaagtaccaatttttcttactttcgaaaattagaatgaaaaccttcatgaaatggtattattcactgcctactttcttaaagactatcttcatcatgatccaactcctgtctgtataactcagaattaccattcttaacaataattatggcactgtgttgtaaagtggtgaggctcccaaaggtcactctgtatataatgctatgtgccatagtctttggctgttgggtttttctgtttcattttattttgattttagaatgtttctgactccttcatcttatcaggcttgtcactttttgtatgtagcagtgtactttctagaggtgaatctgtctaacttctaaaggcaaaaaaacttgaaaaaaagttggtaaataaagacttgaaaaatagaattaaaggattttcttagagccatgtgacatctgtgttagtttttcacaagcctttttttttttttttttttttttttttgagatgtagtttcactgttgctgctcactctggagtgcaatggcgcaatatcggttcactgtaacctccgcctcccaggttcaagcaattctcctgcctcagcctcctgagtagctgggactacaggcacccaccacctcacccggctaatttttgtatttttagtagaaacagggttacaccacgttggccaggctagtctcaaacccctgacctcaggtgattcaccccaccttggcctctcaaagtgctgggattacaggcatgagccactgcgcccggccttcataagcctttgtttattcctccctgcttcttagttatagtcttagttatattgttggagttttaggaaaagtaacgtccagatgaggtaaatcttagttcatgtgacataatactctgcttttagtgtattcttctcttctcattttagagattctattttctcttgtattggtattattttacagaagcctcttcagatcctttttggaaggagatataatttatacttgccttatttctcttttgtgtatttgtgtgatattgtatatgcacacaaaggggcacgtgtaagtatgtgtgtgcacgcacacacatgcatacatcatctttttattcatagaatactctgccaaccatggtctccttggaaggtataagtatgtctgcggttgtagagaacaatcacttgcctcctggatgtatatcacctttgcccaggagcccctgcaatgtgagtggctggactctggggtggctgtctgtctgctgccatagatccatgttccacaggaatatctttatgcagcatgtgagtctccatttgaacaatcatatattaggaatcatgctattcttaggaatctttagaaatacctgagtactaaatttgtctcataacttagcaaatgcatataacaaatgatttcctgcacgttattgtcatacaccattttaccttgtagcacataactactgctgtcatccttggatagaactcagctaagttagttcctccctcttctagtaatcatatttactattgaatacagcagcatatgatggaagtggtccaaagtaaaaaattggctttatcacagaatcataacattttagcattatatgaggccttaaaaataacactttggatagcaggaatatgcagactccataaaaagaagagttctgtgaagggaaggaaatgaatttttatctattgaatgctcactatgtatttggctgctagactaaatgctatagatactttttcctaatttaattgtaacaccaatcctatggagtgtatgctattatcccattttacagatgatgaaactgaggccaagaagttaattcatcttgcccaaccttaaaattattaaagtcaagcagttatgtaaacctaggtctccctggccctaaaggccatactctttccattgttcttctctaccatgtctctcctaagtagaaagttccttttttatctgttgtccaaaactcatttagctgggttagtcattcacagcaatactgtaagactagcttattctttacagtaacaatagaatctttttctaatcctttattcctttcagggcattgctatatggctatcattatggtaggcatattcatgaataagtctgttcttttaacagcacagtgtgagtttatgagagtaggatataaaaacaaggagagaaatagggagcaaagtctagctgtctcacagaaggcagccctagaccacaaaagaggcatatgtaggtcaattcaagttagaaaaaaaaaaaagatctgatgtatgggttgatcattgtttatggattttctatttgacatttgatgtcttcaaatagtatactgtctttcaaatggaaagtaaaaaatgtatcacatagactatgcttgaaaaggttatccacatcttagacatgcatacatttttaaaacaacagctataaagtcatggacaaccatgtgtctcttcgaaagaatcactaatgaaaatggatatgatattacccctgtaatgtgccaactatctacattgttactattaaagcatccttaatcaaagtttctgccaagttcactgagaatgttagagacagtaaagatttggagcattttaatccacttattcaatataagtgtgagcctgtggcagactaagatatgaaaaaaaattcactgtaatcagatcttacaaaattatgttatatctttgaaatcatccagcagaatgaataattttcctcggtctttcatatgctaaaagggagtaagggcataaggttgcatttttggtcatctgaagcatgttaaatcatacaacttttttgatgcatattaagataactataaaaataccaaatactttactaaaaagagaaagtttgaagcacagcaaactaaaaggaaatagcaacagtaacaacagcaaaatatcaatcttgaagactccagcagtagggaccctcaaaaatgtcaggctgaaaaaatgagacacagccaaacagcccacggaaacagtatgcagaacaataatcattttgatactatgccattttcatgtggtagcccaatctgaggaagttaaagtgaaacagactcacagaggctggagagattggtcaacgtttcacataaagactgaaagactgaagattttatacatgtagcagagaggcagggaagaaaactctagaaagagccagcgaattctaaatggcccaaacatccagagtctaatagtctagtgattggttaaataattcttagccctttatttaaccttggctgttcaggccagagctgactattcaattgcagttggaaaataaatgctgaatgcccaaagtacagaaattattctggagagaggccaatgaattttaagtattattttcagcattagttaggttttatttttaaaccgttcttcaaaagactgatatgttcgttcttaattatctttgccccaaagcagttctgtcccctaaaaaataagtacatcataaaggaaacttagacaaatgccaagcttaaatattttccttttgcaaacaatgctggctccagaaacacattacaaacagctgggattgtgaattttctctcctttagaaacaagaatgttctcatgtcaaaggtaacccattgtaaaaaaaaaaaaaattactgattttgtaaaaaatgcacatcatcaattagttctaaagatgtagtcgcccataaaaccaagaccacatggtgaccttggggtagaagaaaaagaaacagataaccattttgtgaaaatttgcgcattttcaccagttgtagctaaatgattgacatcttgctacaagcagcttctgtatgaattgttacaaggactgcaggaagttccaaaggaaagagacagcagagatcactattctcaagaggctcactgttagtggtatagtaaacaaatatttcacatgtaacgaattcttaccccttataattcccatataattttgataagaacagaatcacctttggaataaacaaagaggtaacatttattgaacacttatgctagggaccatgcttaatcctctacactgtcccaatttatcaacactataaaataagcatgattattattctcattttacaaatgagtaaaatgaggctcagggaggctaagaaaattgccctctgtcaccaagctgctaagtggcagcatgggattgggggacccaggctgtctgattccaaggttccatgcatgtagccatcaagaaaatttactaggaagtaaggtatttgaatacaaattaattttgttctctttggccagtaacattgactttggtaaaatgaccacagcatcaacataaaggcatatttaggaatttctcccaggtatagaagcacattttcaaatgatcttgcctctgctaaactttagtcagacaacatcaacactgaggtaacaccaggtgaatgaaagtctcatttagtttgaaattaactctgaaatatgcacatttaatttctattactaattcacttttgcaatggtcagagtttttctggaaacactggtatcttaagggagctttgaagagtaattaaaaaaaaccacaggcaaataaactttcaataaaaacagacagtcaggattaaaatgcttttctatatttagaaacataggaatgaactagcatttttcaaattaatttgtaagcccagattcacaccaagtgcatttaaaaccacttcttacacgcctaaatgagatgaactataaacagaagttgacgcacgctaaggtactctgctgaaggcctaagagttctcttcaaatgtaagctatgaggacgaaatgcctatcatctggaatgtttcatcccaagaccctcagaaggctatgttattacttaccctggaggcacaatagtaatttaaatatgtagccatgttatttgataaaatcccaactgagtattaaactacattgtggttcaatcaaattactactgctctgctgctgtaacacacacacacacacacacacacacacacttgcatgaacataaatgtatatgaacatacatgtaccatagtagtacctgatggtagtgttaaaaataaacaataaagaagtagcttccatattcatattaaagtaaattcataatcattcatccacaaccttctttttataggcttcatacaccctaaaactgtggatgtaaaactttcttcctgtaacccacaacaagaaatccatttcacatcagaacagtaaacacacacacacacacacacacacacacacacacacacacacgaaactaatgtttcagcaaataaaactcctactgtatgcagtacattttctttctcattctatttcattttttaaagtacattttcttttctttttaaattttttagagatgaggccttgctacatttcccaggctggccttgaactcctgggctcaagcaatccacctgcttcagcctccaagtagcagggactacaggcacacaccatcatactcagcttatttcttttttaaaaaatgttaggtacaactgacaaatttgattttgtgagcaaataatgggtcatggaatacaagttgaaaaaatactaccctaaagtgcctaaattccagaggaaaagttcacagtgaagtataaaacaagaataaaaataagaagggaggccgagcacggtggctcacacctataatcccagcactttgggaggcagaggcgagcggatccgaggctaggagttcgagaccagcctgaccaacatggtgaaactctgtctctattaaaaatacaaaaaattagctgggtgtggtggtgcatgcctgtaatcccagctactggggaggctgaggcaggagaattgcttgaacctgggaggtggagatcgcagtgagctgagattgtgccactgcactccagcctgggcaacaaaagcaaaactccatctccaaaaaataaaattaaataaataaataaataaataagaagcagagagaaaaattctactgttaaattccaagtaatgtttaaagaacacaggatttgcattagaagtcttcctaattgtattgcatcttaacaggcaaagggaaaaagagttctttgggttgggggccaagaaagtatcctagatatctgaattggaccttgaatgataaggaaaaacaatgtcatatccacttcacagatgaagaaacacaggcaaaagaggacaaatgctctgtttgctcagtcatttagtctcctgtagaattatcatgtgaattgaatccttactgtggtgcccagccaactttgtcaggctcttctgtaactaaaagtaatgagtcttgtccacccacctgtgcacatcataggtactgtcagccatgtttggcttaagagcatcattgacctcaatgaccacttcagcttgggaaaggctgcagctgggctgggaccccagctgatgatggggagacagaggaaatgaaaattccggagtgaggtttcaaagacatcttcatttacaattttgcatttaaaatttaattaattcaaaagttttccatttaaagttttaaatatttgagactttaattaaaacagagaacataaggccagacatagtggcttatgcctataatcccagcactttgggaaaccaaggcaggcggatcacttgaggtcaggagtttgagaccagcttggccaacatggtgaaaccccgtctctactaaaaatacaaaaattagctgggtgtggtggtgcatgcctgtattcccagccactcaggaggctgaggcaggagaacagcttgatcccaggaggtggaggttatagtgagccgagatcacgccactgcactatagcctggagcctgggcaacagaacgagactccatctcaaaaacaaaaacaaaaaaacagcaaacgtagagatatatttctgaccatttctcttcaaaaaagattagtatgaagaatttcaaacatacataaattaaagagaatggtaaaataatcccccatatacccatcaactagattcaaaaattggcaagattttgtcacacttgatttattccctacattgttcttgctgccaaagtattttaaagcaaatcccggccataatttcactcctaattacttagtatgcatctctaaaaatattttctttatataaccaaaatgtcactattatacttaaaaatttaataatcccttggtatcctgtaaaacacagccaattcaaatttaccaggccacctcaaaaattgttttattagagttgaatagttgaaatcaggatcaaaataagttctgcacctaccccccttgctaacccttaccttgtacctatcatttatatcctatcatctcccacttcattccccccaatttcccagaaattcactatacttaggaaatataaatattttagttttttcttcccaagtctgcatgaccacattgaaagcagcatagcttttctgcaacagtgacatccatctttgcagctatccacggtaaggatatcttctattgcaaacagcatgcttatgttctgattaggttaaagtaaaaatgaaatgcatatgtgctaagtgattataatcatgcaagaaagttctttgcagagaaacagtgaggatggaatggctgaggtttggtggaggatgctggtaaccagtgatgtgaattcctggagaagtagaaatgagctaagttgaaggttagccttgaaccagaagaagaacatcctttcctctgagactcaggaaatgtaaacataggtgtaggtattctctgttggtaggagttgagttgtggagttttctttgtgaggtacatgagacaaggccatttgctaagagtgctgggttatataagagaagataaccaagcaaacaaagaggtaatgagttctgctctgcgttaggcattgtgctaggttgcatatctatacctacactatatacacaatatgtattatatacatttttctatgtatatgtgtgtatgtgtgtataaatatatatatattaaatacataatattatatatatatatataaatttctaggccgggcgcagtggctcaggcctgtaatcctagcactttgggaggctgaggagggtggatcacgaggtcaggagatcgagaccatcctggctaacacagtgaaaccccgtctctactaaaaatacaaaaaaaaattagctgagcgtggtggcgggcgcctgtagtcccagctactcgggaggctgaggcaggagaatggcgtgaacccgggaggtggagcttgcagtgagctgagattgtgccactgcactccagcctgggcaacagagcgagagtccatctcaaaaaaaaaaaaaaaaatatatatatatatatatataaaatttcaccaaacagtttgtaacacaaagccaagttggtattaatgtgctgatttttacagaagagggaaatgtggtttagagaggggttcagtatctgcccaaattcacaaagtggtagaggctgagtgtgaattcagtctgtctgacactaatcataagtactaaggaaaatgaaagagaggcacaagttaaaacatcataaaatgtcatttatgggtcctgccaagattggaaaccatatattcataacagcacaacaatacagttggcaagcagaaggcagctcttaggattaatccaggactgagaggtttgcctggtggatgaagtcgcagaggctgccggtgccctcccagacctcccagacactcacctttcctgtgcatgctgacagtttcttcactggagcagctgagactctccacctcagggtttttctctagctgtgtgagcaggcctcgccctcagacaaaagggaggtgagaagctcttaaggaagaagttcccctgggagcagcccacagccagtgacccatgaatgttggtggatgaacaccctagctccggtgcctctggagggaggaccactttgagacgtgctcctccttacagttgtccaaacgctcagaggcagatccagcccttgcccacagaagtgccctgctgcttagcacaccctgcagtagcttcctcccctttgctgtctcaattccccatgactttatatgtacttcccagaatcgcctcctgagctgactacccgtactgaaatcctcaaagtccacttctggggaatcaaaaccaaaacaatggggaaaagggataaggaagtccaggaactgaaagtgttggtaagtttaatttcactgccaaccatgaagtttagttttgggaaagcaggaaccaaagttaagaggaggtagggagaataacaaacagtggagataatagaggttttaataagaaaagaacaggaggctcagagagagtaaggaaattgggagggtggaagaggataagagggtgtgtgatacttgagtttgagctctcataggtagacagttggagttgatgaaaaggtcaaaggtaaggccatgggaattagttctcagtggagcttatgtgaatgctaatgaaactgggatgtcatgaaagaaatagccggagtgttgaagtctttctttcaggaatattgaaatctgccaggatgatggcaggagttgggaagatgagaagccttggcaagctgtcagagcctggaagtgacctgaatatagcagacagctacgacaaaacatgttaaaggcaataaaactgatcggtgcccattgcaaaggaggagggagagcttgggagaagcagtttggaactaggataatgctgatacctcttcctaactctgttttgaggtaccctagacttctccatctttacctgacaggagtaaaaggagagaaatgttcttaggggagaagcagatttcctgaaggcctggaggtaaaggcagcacactgtctgatgtcagagagtgtggggaagtttatttacaatggaaaagagttttcagtgtgcacaatggaaagcactggaagagaaatcagcaaaaggaagataagctattggaagaaagggaggatccctgtatcgcatgacatcctcagggaggattcatgaacccagaggcttcggacaatgagcaggagaggaagcggagctgaggataaccaggtaaaggccaggatggtggtaccatagagttgtattaaaagcacaaactttggaattaggtcctggattggctattgactccggaatcttggtcacattatctaaaatcctatgcctcagtttccttttctgtacaatgagaataaatagttacctcatcagacaattttgaggatgaaatgtaaaatgctaagctccactcttggcccacaataaacactcaataactgttcattagttttcattataactagccttatggtttggataagtccgttggtagaaaggattttaacaatcgcccaagggtctcatgtattgttaggacccatgtattcttacatctgttgggcaaaaattatacatatacacatacacccacatacacagagaaatacaccagtcaaaagttgatttctttttcctagaaagtaaaaattctgaatctgcattttagcccagtttttctgtcaccaggactgggacaaatgaggcacatggggtacagaattaagaagatgctcatattcaatgagcgtacaactggagaatgagggcctccttacatgctacaccctaagtacctggcttgcctcatcctagtcccagcccacctgtcagtaaccaccaactcctctccactgcgtaggccaggccaatggttagattctagagcagagccgtcccacatacagaccctggtcatgccacatggatatgtgttagaagcagaatgaccctcttgttaccctgtagatggccatgactaattgatatgcacaaatatatatctcagggctcttcactagagtttatacatactgattcctatcttatgtgatacatcttggaactgttctaaattaatttaaaatatatatgccatggttgaaggcatattaataaatccaaaggagagaaaattaatcagccactttatgaattgtgcttcttgggctcacactcagataatccattcaagtgctgacacttttacttatacaaattaatagtactggcaaagaaagcctaaattgaaccataattcacacgttttataattagtattacctgccaatatgtagaacttaccagttgcattttggctacaagattaacattgaagagctattgcgaccttattctcttatatttcttagttcttattttggcttaataagcactttttgtgtgtgtgctaggcattgtgcaaaatacagtctcatgccaccctattcaatccttacaaaagccctatcagttctttccattcattatcattatttctatcaggtatttctgttcattattaaaatatttctgcttaatttagtgttaaagacacatatttgttttcatgctatgccatcacataatcagtgttgtctgtggcagtaatataaagaagaatgtttctatctctatccatactgactttctaagacacaaattttgttgattaaaattcattgattataaaggcataagaaagtttaaattataaagagaagaccaagaaatcctgttatgtactttcatctgttgttctggctcactcagcatccattcttctctgtgtgcagtatcaccctaattcccaagggagccacccctccttctgcatgtggtctgggtggggctgtcaatcaaggtgccctcttgccctggtcacaaagtgggcataggatccaagacatactaaagaaactctcactcctggaggttggggagaatggcacttggatataaaccagctggagctgattctcccctgaggaggttccctggagacaggattttccacttcttgctatctagagtcttgaaaccccctgattccttacattttctaaatttggttattttcagacttttcttgggttgcacagaaaccccaagttcttgtaacgaattactctcttgattaaattcaccaaaactcatgcctggtgcttgcaaccaaagaatacacaccgacacataccatcttagcacatctattgtaattcagatgtactacgctccaggtttttcataatcatatttttacataggtaaaactcatttaattctgttcctgttgaacacatggatcatttcaagggctactattatttaaccctacagcgattatgattattttcatgcatatcactttattttggattctttcctctgagagattccaagaagtgaaattattgagtcaaagggcacagatattagtacagctcctgaaagatattgccaaaatgctttataaaatggccctgacaatttataatacattcacgggctcatttgtattaagccttcagtcaacattgaccatcatgtagttttaatattctgctgccaatgttctctatactttgctcaaaaaagtgcagcacatgactcacacattcaacaggagagataaaactccctactctggcactctgaatcatttcctcaaacagtggtgtatttgttaactttatggaagtataatttaccaatataaaaattgctccaatgttaagatattatgtaatctcaaagtacaactgatgtgctgtttcctttggtaatctttctagaattatagttatctatatataacaattttcctcatggaatgtgccatagagtaagagtataggaaccattattctgtgagttctgaggtaagtatatactgaaaccatatacaaaaaactacaaacacagcccttctaaaaatcccagtgtggcccatataaattttttataataaaagaaagtaaagaggtctattttcctttcctcctttgagctgtttcaatgccaaaattatatcttagcaatagtgactaggtcactggcctgtgaataagataggctgaatacaagacacacaatgagtgtccagcaagaacagatttaagaaaatgagttcttaaggggcacaagtgggcagcaggtcaggcatgctgcccaagctacacctggcgcccacaaaaggctggggtacttctgtataaatcctggcctcacccaaggctgccagagctgacacattccctatcccccttatcctctctccagaatgtctgagaaaacaaaaagaaaaaatataatctgagaactgctgctgtgggccagctaatcttgtcaccaaatatgtagtgcacaattactatgagcaaggaagtgggtgccaggatccagagtggccctcaatctttatccattaatgtctgtacctccttctcgaattcagcaccgtttgatctttgatcatcacagaatctgctcattccagtctcccgttaaatctgtgaaagctgcttcagccctacttcttgcaagtcagtttcaagcctctcttatcacagtgtacagattctgaggaggggacactgattctactgctgaggcctggttcactctctcaccccttagaataagaagtcaggctgactcctatcatagtcatgtttccaggaaagagcctaaactccttctgacactgagatccacaaaagggttgatgaggaagcttggaatttggggtgccatttaaagattttaagtggagacttgagacaaaaagagttgcatttttaggaatttaactggcaaatgatagaggatagattatgggatgagaggccagtttggaagtacagtgacagttaaaacataagttgggagacattggttaatgtggattcaaccaaggagagagatggtcccccgatccagccaatactgtatcctgagagtggcacccaggtttttctttatctagaagaccatcctattacatttcatggcatctacttcaaacagaatgaatgcttcctattagtcctaatttcctcggtaactttttgtacatctgcaagtaatgaatgtattcatataaactcttcttgcagcaggcagaggagatacagagacagctaactgcataaagtgctccagaaacatagcccaaatcacaatgatgttacaccactgtgattcaggataaagggaccttaaagaaaaaaataaaaacaactaaatgtgtttatgctatgttatgctgtttatgtttcttctatttgagaagctcctgactcaaccactattgaaaaattccgaagtcctataaagatacaattctcttgactgagaataacattctgaaatattattattaggtcaataaattctcacttaaggaaaaggaattagagatgcaccatttataacaacttctcaatgcaaaaactgagttctgaggccaaaaaatatatacactttaatccatttttcagtaactttcacattttagtgtaatattttaaaattaaagctattacattttaaaataatatggaaacagtaaaaagatcagtagttgcctgcagttaagggagagggaaggataaacaggcagagcacagaggatttttagagcagtaaaatactctatgataatataatgaaagatgtacattattatatatttatcagagcccacagaatacaacaccaagagtgaatcctaatgtcaactacagaccttgggtgatagtggtgtgtcaatgtaggtccactaattgcaacaaacataccactctggtggaggatggtgataatgggggtgactatgcatggatagggaactgggagtatctgggaactctttgtattttccactcaattttcttgtgaacatacactgctctaaaaaataaagtctatttgaataataataatgagacaggatgtattctatattaaaatacatgtgaaactgtactatatgaaaaaactttggcaaaaagaaagtctcatcaattctctgattcccaaatgtctagatatctgtaagttactattcaagtcatctaatacacaaagggaattttttctatgttagaaaaagtttccacaacttctatgatgaactattctgaatgttactagaacttagaagtacggtaactggaaattaaggcagataaaaacatctgtctctatgcaaaatatgtccctcagaggttaaactgggtgaaaataaatagctaacctggcaaccaaataaaactacaaagcaacaaacacaagtataaacattctgaaaagtgtttttaaaagacaaagtgaaatgctcctagaaaatgaacatttaaaatgtatcatatgaaactttaatatctcacaataagaaacatacctttcttcttgttatgctgcaagacgtcatagctgccttgagtatcaaattatgtatatataattatatacataacatatacatatatagttttctacaagtctctcaataaacatatattctgaaaatatggagcacttcagttgtgcacttcagttgtgcctttgatcactgcacgagcccaggcccacaatatcaaatgaagaagagttaacatgttgacatctgttttaggctaaaaatggaaattgtgaagctcttctctcctcttccaagagttccctggaatggatcaaaaagcttcaaaagacttggctccaagggaacttctaggcaatgtctacacagcacaaaatgatatggaggcttggcatctccctaaagaattagggctgtgttgactactgcaaaaaggggactgaacctagctccctttgtgacttgaaaggtcaaaacagttctccaagctccagaattttcctttatgtggatctatgtattaatttttcataaaacctcaaagaaaactccttgccttcagcatagttagacaacgactgaacatctagactgggccatgtattttgccaatactaggggtaaaaaggctgactttcccaggtaagtgaggcagaggaatgtcctcagtctaaattgaaaagaaaccttcccaaacttacactatttttttcacaccaaatcaacttggcctgtgaattttttctttccttgaggctgagtcaagatgaactagcatttgcgggtggagtggttacttgagagcacaccattcgttacaaggggtctttatatgtaaagcagaaacatttttgttttgcttttcagttggagtgagcacgaggaattgattcttttttttctccaaagttaaaagagcaaacccagagactaccaaaatgttaggtttgtttatcatttccaagttgaaataaagcgtaatgtgaatactcagcactctatctttccctgattaaagtgatcctgccctttgaattgctacacaggatactgttctgtacagctcactcacacggctgtaataagtcacaacagtttggcacctcgcccaacaaaatacaaactctcctgaagtcttgagctttcccatggcaacatcacagtcaccaacacagcaaacaatcactccaatccctgctcccgctttccttttctaacagcaaaggatatcattgcagccagcctcttagaactgtgctcattatcatctatgaaaggagatagcaacggagatcaagttgccttcagtgctgagcttaaagtcagaccaaaagcaggataagtacaggagcatagggaagttttacttatgcttttactgtaaaggaagagtgagaggctgtatgaaaagtatattccttaaatatatcccttaaagtatattccttaatgtgccttgctgccctgattacccagtggctctggctcactcacaatcttcatacaaaactcccattcacatctagcccaggcactctcgacagcagctggggagggggaaatgccatcttaaagctgcaactccgacacattcctgaaactgcaaaattggaacggctttcaaacctcagctgctttctccaagggaatgatcattctgctcatatgggaaggctgcctagcagtaagagcagggtggcagctccgtacagcagattaaagcagcaccacttcctttatgaccgcttcttttcagattcaaataacatccttaggggtgccagtctcttctcataaaaagtgtctgggctcccacaaatcccctaaaatgataatctcttcgtgtgtattaattttattttcatttgatggcccatgagagttcaggaacagaactaatagtgaacccaagggaatgaatggcctatgactcatgggtggatatcattttataggggaaaggaagaggagggtggaagagagtcctggcttcatgtggttttgaatgctgattgttctactctggaattatggtaaagccctgcgcatgctcatggaagattctggcttctttacaattctagactcaggccttacacagtgttatagtttacatttgggatcacccgacctcagaaatcaaaatttcagagggagtttcatttcagcatagctaaaatttggggggcagtggtggtggggcattagtccatgtaataaagaatataaaatactaatgacaaagtatggaagtaattataccaagatatttcaatgctatcctaaaccacaaggaggaaaaaaaaatccagtgatttactaaacaatagtagaattctgaaatataactgaagcatctctaacatacatatgggtgactgctgtgtcattcaagactctgtgtatttaagtactaaccctcaaaatccattttagtgacaatttacataattacagtattactggaaattctgacatcaacttttcacttactgcatacctgattatgttttattctttattatccaatcatttcccatacccaaaatctaattatgttgcaatttttatcagtaagaaacctactttagacataaaatattaagctaaataaacaaatggtactttgcatcagagttgctctaacatctcagaatacacttcccaaaaattacatccatggctacttcctacttctttatgtttcagcttaaatttaaagaaacttgtgctttataaaaaatgactagctataataatgtatattttttagtttgtttgcttgtttcttatatgtcttcctattagaatgtaaagaccttgaagctggggaccatgtagctaacctcatgtcttacacacaatggatactgagcaaatatttattgaatgaatgaatgcttcatttatctatacacagtgaaccatacatgtgctatatactttctgctctgtgtactcttgtccaaatgtaaaaatgctgcagcataaacaaataattcatggcataaaatacaatacaataaaatgaaaataactcattagttaagttcagcaaaacagagaagtaaaagatagagaaaggaagaaaactaagtgcccttgctggtgttagctggcaatgtcttttgtcttgaaagttctgggtgaatgtttttgggtttttggagagaatgtactcccactgaaatgagtaatccattgtgtctagcatcatactgggatttggaatgccattgtgttttagtatgaagtgcttgacaatgcattcacacccagaggtcagtttcaaaactgccctttagtttaaccctatagttgtgatttagtagaaggattcgaataactgcataatttgtttaccacacattattctgctcacaattatgagtaattcattcttacctacagccatggaatctgtacagagaacttcattcaacccagtagcaggattgctaagatcatcatggatgacgatgatgaagatagtatctaacactgagcacagtaactacctgctcactctcccttaatcttgccaccatccctgttaggcaggttttgctacatcaccatttcatagatggtggaattaaagccttagaattaaataatttccctcaatttgctcagttaataaatggtagagcttggattctagtgcccaaggtattgactactgtgatattccacctcccaaaggaacaatttttttttttttttttctgagacagggtctcactctgccacctaggctggagtgcagtggtgcagtcacggcttactgaggtcccgacctctccaggctcaggtattcctcccacctcagcctcccacgtagctggaactacagataacatgccaccacgcccagctaatttatacatttttttttgtagagatgggtttttgccatgttgactaggccggtcttaaactcctggactcaagcagtctaccagctttggccttcagaagtgattggattacaggtgtgagccaccacacctggtcagaatgatttttaagactctgaagtttccaaaatgtatatgatgacatatagggagcatacttgcttcttgctcttttaaaaaactatcatcatatttggagccaagaaatcagtttatactgtgattacgtgaaaaggaaattcttctatacataaactgagaactgatatgcaaagaagcctactataaaaaaatagctaaaatgtttttgttgtcagaagctaaaggttattttttttttcactaagtaatgtaaaaatcagtatatggaaagtcagagcaacataaaacgttaaaaattttgaaacaaacttttagattcattttgcttaagaatgtatcagggtttataccatttcatcaacattattaccttggggatgactacagtatgtcaaatttcaccccaatgtgacctgaaactgccagaagcatgaaatctctggaatcatctttcaagttaccacattgctgcatatgagttgaaacatttcagtacataaaagaaagatacacattctaaccctgtatcttcttgaataccttttctaattcacatattattaaagcaagaaacatgtaagccctttcttcctagtccttaggttggcaatactgtggtgtcagtaatttataacatgctttctcatatataataagaagcactggactaaagagtctgctggtttgactcttcacgcaagtcaattcaaattaagtcactgtgcctctctgagcctcagtctccccaggtgtaaaaagggaaaatatggtcaactcttctgcgtccagtgttgtaaaaataaaatgagaaatttctttataagctataatctgctatgtgaatgcatgggactcttctaaggcatattttacaatatcatttatgcaaatgtaggtgaatatgttaaccatataccagaaaagtggcaataaatagcccaagaaatgtgttcaatggctaacatctaaggagtcccaactatgtctaggcaccaagctaagtactttacatgtatcatctcatttaactctcacaatagctctttattagttatcaccccatttcatacataaggacattgtaactcagagaggtgagggaatttgttcaaatgttcacaagaaaagacagggcttagactcaaatctaggtccagatagctttttaccactttattatgtttcactatgtttacattggctaggagtttgagaagtcatgtgagtccattcctggcatgcagcagaatcatgaagggaacaaaagaagtgaaagagtaggaagaaatagaagaagctggatagtcacactcactttagttcttttgtataagccattaggaatccttagattatctaagatatttctgcaaagcatcttataaaatcaaattgtgattctggaatatctccaaccttgaatgttaatcattcctgaaatatgaatgcacaattcaccacattcatcccacgggagaaggcagcagtagtagcagagggttggtgctacagatagctagagatggcggtacctagataggattctcatagctgaggccagcaaagacacctcttcttgattgtccaagctccaagctgaggttcgaaacacagtcttacatgcagaaatggtgctataggaaaacatatgtccaagttatacacagcttacttacaagcttttggaatctaactttgttataatagggagaatacctctatgatggttaagtttcactgagagttaggcaatcaaaagttgtctacatttgcttttctaaataattttttcaagatcctttttgtgactttgatgaggaaggcttttttccaatggtgtgtactatttgattctaagagcaaagatatccttctttgccagtgtagcatgtaacaataataaagctatagccactgataaagatctatgtagctagaatgagcaaacaccggccaggcttggtggctcacacctgtaatcccagcactttgggaggccgaggcaggttcaaaaccagcctggccaacatggtgaaaccctgtctctacaaaaacacaaaaattaaccgggcatgatagcaggggcctgtaatctcagctacttgggagactgaagtgggagaatcatttgaacccaggaggtggaggttgtagtgagctgagattgtgccacctgcactccagcctgggcgacagagcaagactctatctcaaaaaaaaaaaaaaaaaaaaaaaaagaatgagcaaatgccctgcctttctcaatcaagtttatcatctcacaaaggaaaactccaaagccaaaacaggctgtctcaggccaagtcctaaagggcattttcttctttaatcacccaatgagaatccagataggtgggcttttgtgtgtgagaagtgattgtaattcaacattagggaactgaaaatatcattggattcatcattacaatggattcatctgagtctgaatggacagtaggaagccccgagagctcatcccaggagatgtacaatgtatgttttgaaatttagtcactctttaagtaagcaaatttgaacaatagttgtttgacaatatgctaaactgaatttccctctaggaagtatgaggcagagcacagaaagtaatattcaggctatccactatttttttttattgtggtggaacattcattacataaaatttaccattttaatcatttgtaagtgtacaagtctgtggcattaagcacattcacattgctgtgcagccatcacaccgtctatctccaggcaggccatcgacttacctgttgtgaaaaatagctttagtttcttatcaggaactaatttcagttagttaggaactgtactgtgacacagaaataaatagcttagttgtattggaatctgaactagtccatctctttattaaatgttatgctagttataggaagcaatatgttctctttcattgggaagacaactatattttctactttccccaaaaagtgcagtgttagcgccagacaaaataataatctttaagatagtgagtacttgaatgtgctggctactatgctaagtattttatgtgcatcaactcagtctcacaaccatctaatcgtcattatccctcttgcacatgtgaaggaaactgaggtgcggaggttaaatagattgctaagatcccacaattagcaaggggtagagctggggctcacaacctgatctatctaacttctgagaccaatagtctaactctaagaggttcacaaatcccgaggcatcggcatccacctgagcagctgttagaaatgcaaatccttcatccccatctcagaactggggtggacgccaaggtgcaatgtaagcagctctccgggccattctgaggctcactggaatttcggaacctttgctctagccactgcctcattgcatttcccttttttcacactcctttcccaccatgccaaatcccaccacttgttcttggtcacacagtcttcattattgttccccacctcgcccagcctccccaaaattgccccattcttcaaactgactttttccttcctctttatagcctgcctttctcccattaaagactcctctttcctgtcactgttttctgctataatttagtaaaagaaacaaaaacaaatcctactaagccaatcctacaaggctttggtttgttcactcatcaataaatatttacagagaaccatatatttttaaggtgtttttaggaagtgatctagtgttttgggatacatttgtgaataaaaagacaaatatacccatcctcatgaaggtcctcatacttgattaaaaatgcagatattagggttttacagcagaaatttggatttttcgacatttgaaataagaccctagaatctgcagtttatcaagcactccaggtggttctgatgccaggtgaatcaggtgatttaagtaccctgatacatcccgtgaagtagcttgagtaggagcacagtaattcatctggtgtttctgctttctaaatttgtttgtcttcttctccccatagggtctttgggagagggcagggatatgaaaaaggaaaggaaaaaatttcaggcaaactgaagtagcatttttcaagaaagggaactttctaaggtctcctaaggctagttctgcagagaagattttgcttaacttgagccctgggtgatgtgatttaaagacagaaaaccaataccaaaacgggacaagagtcacaggtggcctcttggcctgtgccccctgagctaggccagccagctgctgtttataaacctgtggcctgctagggcctgctacagatggtctttttggattatttcaaagacaacacctttaactctgagtggtagtttggaatcattttaagtcctcttgatatcccctctttcctagtaagaacaagaccagcttgtttaacatttcctcataccacagatatttttcatgaggcctcacccactcccagacaataacaacatccttcctgtgggttggtgaccagtgctgcacgtatctaagaggtataataagcattttacacggtggcattgccacctccttctctttgtttcaactccttctgctaagataacctaaaacacagggaaacgggaaaataggcagcttaactttttttccccttttccaagatgcctcccaaattctagccctgagtcaactactgttccattattctgtctagaagataatatagactcattttgtacccaatataaatgtttggcacagaaacagccttccttcaaatgggtccagaggggaagtagttatgggagtggcaggggcaggcatggctccatcccagccccctgcaatccagactctaggccagaggacagacaaagtcagcattctgaacgggaagctggtgttgcagccaccagtgaggaattgtattcttactccacaatttaaaaggccaaacatttgtcctactccaaacaacaaagtgccaaccctagaggttccatttagttacagtaggcactagaaagcttctgagatagatagtatgagtttcctaatctgatttcaacaacctgggctgttttccttagttctaaagagtatattaaagaggaggttctccatcagacatattttgccttccaggggatacttgacaatgtctgatcccaattcatggtcctaatgtagatggaaggtggggaatggtattgaaaaaatgaggacaaaacggtgccaatggataatttgtggaaggacatagttgtcctcttgttaaccttaaaggctggaaatgataactctaaacattccctaaataatccattttggtttcctgtaaaatatatttatattgtatctaatttatttcatacttatattttcattcaagctactacctcttgggctgattttcctatatgcttatctccacttaccgtataaagtagaagtacattttatttattccaatgctatctctttcacactttaaaatttaaactagtcctaggatcttgttaacagtttccagactcctgtttttttcatagagctttttacatttttgtgcctctggattcaaagggttctaatggtcttggtttatcttcatatagcattcactcacccactctgacaggtcagaatgactcaatctcatcatgcgtggtacccagaaggcccaacagagaagagagcaatctagttgtccctgaggatacttggctcaaagcctcctaccatcctctctgagccaggctatgcatccagtccctgcacagaggagctggctgtgaggaactatagggaaaccctggtcttgactacacaagcttcagttttacataatgcaacttcacaactaattttttcccaatggtcagatcggcaggtagactgaagccattaaggtagccaaaagcaccagtcaactgggatatacagtttttctatcatgtggacatagccttgccatcattcagcaatatgtaagcctgtgacttttctgaaaaacagaatgaggggatctctggttcagttccttgagtttcaatctgggtaagtgggtcacttgttgcatactcttgtaatatccttccacttaatattctagagggatggatttgttagggaaaacagaagcacctattcctgctgttcctttataccctatcttctggaatagaataagtcagggtacttgcttgcccattcaagaagcaaccagtatacccaagcactctggtgggtactgcagatacacaaatgaaaaaggcaataaaatggagtttctactctaaagggagtgatagaccagaatgggaaccaatacataaataaacacagaaaatgcaggttgtaacaaatgctataaataaaacaaagaaggggctaagatacagaataacagaagagtaatctctttaggagggatgttcaataaggctaccattcatgttgagatctaaaaattaagtgggaggcagccaggtgatgagttggagaaataacataataaaaggccctctggggagaaagatctgggctcatttggagaattaaatgatccacacacaacttctgtgtagtaagcaaaggtggcttgaaaagcgaggcaggcagcagcatgagcaggacctacaggcttgcgtaaggggcctggattttattctaagtgcaacaggaggctacttaagagttttaagcaggggtaggatgtaaacaattgtatgttgaaaggtgttaacttttgttgctgtactcagtatggacaatactagaaagaagatgccattgcagcagtcgaggggagaggggatcctgaactgggccaaagtggtgcccagacaggggattcaagctatgctttgaagatggaactgagcaaatgatccaatggcacatagaagagcagatagttggactcctcctctgctgttggggccaagccccctccccactctggtggacactttatttaagagttaagcactcagtgtcttggcgctcattatcttgccaagccctctggttttactcgtccttcagcttcaggcctgcattccacagatgttcctcggtgtcctgttcctgcttgcattcactgaaatggtgcctgtggaaggagtaaattgttccatctgggtcacacatgaagccaacagagcttccacagaaggaaagatgcacctttgcaaatctatacattggtgcctctcaaggcacccagaagccacctggaagcatagatagctttaaaacgtctatgcttcagtgtcttcaaagctaaaaaatacatttcatatccgacctccaaaaatgcctaaaatgcttaagccaagatgatttcaaaaacttccaagacttgagagtttcctaaaagcctgtgtctccaaaagagccacacatttcattcccagtagaggcccgggaaattatgagggtatgtgagatgcacaaattttcaaataccagatgtcttcaagaattatactgtgcctccctttaccaaaacataccaacctactgaattgttatattctttctgaggctggaagttactagtgtcccttccctcttactgccagtttctctaatggtcactccaggaaagaaaatgacaagaggaactgaaaatagggctgcaggctgcccagctttggaaaggcaagaacttctgtggcagggagcagctccttggtcagtgctgggctaagaaaaatcagctgcttcctagctcaggtgccaagactgacagaaggagacagaaaccccagggcacctgcgtctttcttctccaggttcctttgctgacagatgacttatttgcagagcatattcaacaggaacagcctgagtaggaaaacatcaggtggctattgaaagtgcttttacgtatctaaatggtaaactcctgaggacaaatcaagactttaacacaagctgtgaatccagagttattcttcccactcagtacatatgcaagtggcagtcacaactggcaagtgagagttgctttagaggttactaggcctcttaatatcttggatattttgggttgaactaggaggtcatttctgatagcaacttttggcaatgagtcagtacacagatgtggttagaataaagaaagggcagataaaactgagcagtgtctatgtaccagatcctgtaataaatgctttaggtcatttgttggttacatctccaagaaaggtgccactattatcaccattttagagatgagatgacaaaactgaggctcagatgagtcaagcaacatgcccaaggtaacacaggaagaagtaagcaagagacttatgactaaaatccgatatgatcggaccccaaaccttatttcttaagttaatatactttacttcctcactttagctatcaaagacagagaagtgatcatttaagagagttaactaatagaagaatgcaatcactagagagtttatattgttgctacatttttctaaaaacaaaacaaaacaaaaaaacccttattgtggcagataaagaaaacagatacccctatttcctgctaagtctggtcaaggcatactcagtctgaaacaacggtttgatgtccttgtacttatcctaattacatgggcccactgacctgtgagatttgctatatgaaaagcagaatgtaaaacagaatgtaacactcaggagggtgaggatctttgttttgttccctgatatatcctaaggacttaaaatagctgtcctcagtatataggggacattcattgaatacctatgaaattaattaatggtcaaattttaaaatattcagtggtataaccttccttaattaacaacacagaagaggacatggtaacctgggctattggccaatgtttattcattaatgtgttaaatggcctttaagatggctcccagtgatgcctactccctggtactcatatcctgtgtagtcttctcccacactgttcctggtttggcctatgtgaccagtagaatacggcagaagagaaaatgtgtgacttttgagataaggttgtaaatgctgtggcttctatactgatctctctcttggatcactgtttctggaaaagctaactgcttgagaacactcatgcagcctatacggaggccatcacagcaaggaactgaggcctccggtcaacagccagtgaggaattgagattttctcccaacagccatgggagtgaacttggaagcagatcctccatcctcaacctggctttgaggggactgcagccccaaccagtagttggaatgccatctcatgagagatcctgagctagtaccacccaactaagcagttcgcaaaagtctgacccttagaaaatgtgtgaaataataaatgtttgctgctttcaactgccaagttttgaagtaatttgttacaaagcaatagataactgctaaaattaatcttgtcatgttattagcatggcaactggaaactatcttctgaacaaaaagtcatgccatcagagaattttaaaataatagctcaattttacaaactcttctccctcctagaagcttttgaaacacaagatatatttttatgtcttgctatggtctcttttgctttgctactcattgaattagttatgcacagatataggtacaatagggcccagatgtgatgttatggttatgtggaggaggagtatacatctcccccaaaggagagaggagatattcttgtgaacttttaggaaaaatcttcctgctgacattaaataattttgattctagtttaatttctcaggaacttaaattctaggttaggggaaatatcataacccataaaactaaataatccgataattttttattgcaacaagcactaggatgccaatgagcataccacagtccgtacattctgaaggccaactctcagaaggaggtggttgagatttttctgaatttggcaaagtacctacagtggcatctcattcaaaaaatcatgcagagaacattcactgatgagaattaccagctcattctgcagaagctacagtgaacttgccatgctggccagaaagataagagacatgcaaactagacacaactccaaagatacttttcccaccaaaggcgttttatgagttaggatatatctatgaaatatttgcaactcaacaaggaggaaaatggaatgaagtggaatgaactccttgttatattgattggattatgtcacctgtcaactaacaaattccaccacagcaaacctaagcaatgaagtacagtcaggggtctgctgacacactgggaggctggagtaagggagtcattagacatgaaactactcatcacagctccaaagcaactctgctcagctgactaaagaatataattttgagtttgttctctagccctctggtatactcaagctcatggcaactcagggaagaagcacattttgctgactctggaaatggctctggcagaacatccactctcatctctgagcagatctaataggagtggagtagacaattcccacttgggggttgattgtattatatctcccccttaccctactcaacttctgctggtatagaggcattctcttgtcaatttccagattaatgtacagtgatagtcttcaattcattattactataagaagacaggaataggagtttgtgaggtagagatgtgtgtgtgtttgtgtgtgtatttcttatgcctggaaaaacagccagcatttgtagcaaatgaatgcctgctacaaccagaagattcttgtctttgaaagtacttgaaatggagagaaatggaaaaaccagagcaggaagtatggcaataagaaaacatatcatatgacaaggaccaagaaagtcaatgttttcaagagcacatccagttggaagagtgggagaaaacatgtggaatccacatgctggccaatttcagggcttatctgcctcggatatggggtagaaaataacattttacctgaggggtaaaaacaacactgcagcaacatgccttcaaatagggtttgtgtagaaagacacactcatcatttagctggagggtttccaggccaaggtacttccacagcatatggctgcccactgggctcgtgaccctgaaaacatacttccagatctttctatacttcccacttcacaaatgtagccaacctctgagcacagttgccctcttgtattgctaaagggatgaagaaatgctaaatcctcttggaaagctggtgtttctcctgtgctggaatataagaatttgcctaacactacttttagaatcttaaatcacgagagaaagatgtcaaagttcaagcctctcctttttaacactgaaattcctcctaaagctcccgcttgaaggccagaagtcacaaccgcttcaaaagattactatgtgttttgttacacttgcttaaattccttccagagacaaaagaaatagacatatttgcgatattccttcctttatcatatttctgtagattctttttcaaggtcctcagacatcaataatccatcagtgcatgtacaagctgatgcttggcgtttgggatattatttgttctcctaatgggactagtagagtctacagaatttagagtgtgcaggaagtatgtctatagaaggtttttgttctaaatataggagattttaagggcaaaacgatttactcagtatactagactgccttctttgagccattctgttctggtcaatcatataaaatatgtgtggccaacactattccctccacatgtgtttaatggacatttgtcatagcaaaatgacctagcagttccatttcttcttcccttcaaattaccaatatgactggaccatcaaacaactaaatgccaattttttttaaagatcatgaacagttttgagttatatgagtggaaaaatgttcctgaaggccgagttttttgttgttgttgttgttgtttttttccttatagcaacttttcaacagctaaattgcttttggtaaatatgagtaaagaaaataagctcccagtcacagcacatgtttacaacgaagttaaaggctcttaaaaatagggtgtttgatggtctactgccaaaatatgaactctagcagcctggagtgcaccgctaataataagagtcagtgttgctatgaaaggcccgagacagagctccaacttagctttaaccttttctccaagaagttccccacaatgacaaggagacataaatttggagttagaggtcaaggtgagaggggaggaagcctgaaaatggtaagaggtcacttaaaaataaagcaaaaaattgttggactgggctcaaacctgaactgcaaaagagaatgaaaagagttcagctgctatctgaggactgactgccttttagaaaagaagaaaatgggcggggcacagtggctcattcctataatcccagcactttgggaggcgggcggatcacgaggtcaggagatccagaccatcctggctaacacggtgaaaccccgtctctactaaaaatacaaaatattagccgggcgtagtggcgggcgcctgtattcccagctcctagggaggctgagccaggagaatggcgtgaacccggaaggcggagcttgcagtgagccgagatcgcgccactgcactccaccctgggggccacggagcgagactccgtctcaaaaaaaagaaacaagaaaatgcctagatagataacaaaatagataacaaaagtccaacgtaaaggaaatatgttaggcatgaagaaagttacgtttgctttctcttcagattcctgaaactagaatgaacagacacacaaagaaaggaaatgccggatgtcctagagttagctgttgtgtagagtggagaatcacagtgtgcctagtattagtggagtcttcccatctccacaggcctaggcttcaggttctttcgcccttggaacccctggagaatctgacgaaactgtggaatgcgtccacactgaaaatgcatatatgccatcgcacaaagttgtgtattcaatttagggaactcacaaactcaagaagctggatcatttatgttctagcatgaaaagaggctactggtttaaaaaaaaaaaaaagcactctccaagagaccatggaacttatcttattcaccactccattcctagtgctgagggtggggcttagatacaatatctcaagacatacttgctaaaatgttttaaaaggcagcttatagaaaaatgtgattccccaaagaaggttccagtgatcacgtaagtttagggtatccattttttttaaacacatctgtacgtttctgttgctccttctagccaaagagaatttccctcagaatattcaccacagtaatggtatctttagaatttccatgtaagaggtgcttaggaagaacgatctggttgcaggttggcgagggagtgaagctgagtttgtattgccctttacaaaatgctgaaaaaaaaaaaaacccatctgcatgctcagagataagaggtttttgtgtcttcaaggaacttatctgtcttcaaggcacttacaatgaattaacttatttaaacccaaacttattctataaatagatttgaggcccactcacagtataatctggtcctgatgcattccttcatgggaattaacaattcatccggaatctctatggattatgctccagatttggattcctcaaccctgaagaatctatctcagaaaccggtcagccatgctgccttctctgtgcctgcagggcagatgtcgacaatgaaccaccacagctgtctttcccatcatgcgtaggtatggccttagaatcctccacacagccctccaggtggctactgaaagctaccctggaatgccagtcaaaacatgtgtcactcataggctctacgtgttcaagcactttctacctcttagaaaagagacgactggcaacagtctcaaagagtaatctgtggcccctagacattcattctgaatttcatctgcagcttagattagcagttagttctaattgtcattggctttcaaatgtcttgttgcacttgccttcaaaattcaggcctggaccatgtgtaagttgagtctgataatacctatgtaattatctgctcctatacgaggtgcgaagtcatgattagaaaccttggccctggcatcatcctgctgtattcaaattctgactccaccacttgtggttgcatgacctgggcatcttccttcacctaatttgtcaatttcctcacttgccaaatgggaataagatagtacctatttcatagtataattgcaaagatatgttaacattcagaaaacgcttagaagagtgccaaacatgataaacgcttaatacatgttattttttttaatgtgttgaaccaaaaggatgccttgaagatcagtatttcacatttggtgtacaatacattcagccacagaaatataaagaactgctgtcccttaaaaattcatgcttgccacagggtagttcaacacacatttatggaatgcttgtgtaatagatgtctgacactattgtaggccatggaaatacaaaaataaataagaaggcacatcttcaccttgaagcaaaatcccaccgattatgagtccccacattttctccaggtaatgagaaaacattcatcggcttaaaaaacctattccctacttgaatctgaatggattcaaaatcacttctcagcaaagagcttcaggtctctccctaaagttccatctaatatattcattctgaaataagcaatggtaaggagaaaaagttaagagaccaatcttggtggcagagaagagtctacttctttaattcaagatcaagtttctcttcataatgaccttgtagccctcgctcctcagacttgctggctgactggacccacaagaaatacaggtaccaaattgtgggctttcatacattaaaaggttttctcatcttgccttgtattcttacaaattattggatttaaataagaaaaaacaagactcttgtttcagcctctcttattctagacttggtgtgccctgggtgtctgacatcctcattccattcatgattgccattctttctaggggagtcattgcttcaaattatgtgtgggtgtatgtctgggagctgaagacattcaacgtccccatctagttgcaaatttagttatacatttggggtttagctattcaactttgccagctttgtgcctcctgcataggtccaggagccccaggggtagactgatgcttactagtggagttagcacagacaagtttgagcctctcatacctgtctcttaaacgagggtagtaatactccagagaagaaactgaaatgatgtttaaactgaaataatgaaataacacactccataaactgcaaatttgctattcaaaagtaagatattattaccatttctcaacttctccaagtctgtttcacatttgtaaactacagatagctccatctttttcagtgatagcataaggtttctgtgaggactctgtaggtcatgtacatatattattattatgaccattacaaatgcgagttatcttccttagatttatgcctgtacctccttgggacactgatcatttttttttttctgtttctataaagaggaacaatattctccttcacaaaccgtacctttcagcagtttctctttaactctcaaaacttgatgatttctaacaaaatgatcacaatagctccaaggcacagaagatgctgacaagaccaccttcttccctggaaatgtcggaatcaacatttcacacagactggccaaagtagcacacagcctgggccaaaaagaccactgtgcaggcagatgtccaggcttggagcagccacgggcacagaaacccctcttctagctctgtgggtagaaatttgtttatggttatcaccttccacagagtttcccagatttgctttcttttaattaacccaaatcaatctccaattagccatatgaagtaaggaacaaagagctgtgcattgtatcaccgttaaatttctcttgttcctttgtttgtttactctctgtctaccccgccccccccccattaaaatgtaaactccattaaacaagaactctgtccttgtgtggttcaaggacccaacacaagacccaacatgtagtaggcactcaacatctgtaaccctattccatcatctttttccttgcaccaacattttcctcttatggcagactgggctttagaatttaaacctgggaagaattttaagagattatctagtccatgtacttttcaaatggttgtagcactggaactctatttttaatcacactaaagcgtgtgtgtgtgtgtgtgtgtgtgtgtgtgcatgtatgtgtgtgtgtgtgttttaaatgcataaacaagaggttaagaccttggagtccaattgcatgcccttccttctttcttttatatccctttgctgaaagtcttaaaaactatctcgagtttaggctgggtgcggtggctcatgcctgtaatcccagcactttggggggccgaggcgggtggatcacgaggtcaggagttcgagaccagcctggcaaacatggtgaaaccccgtctctactgaaaaaatacaaaaaattagccaggtatggtgtgatgggcccctgtaatcccagctactcgggaggctgaggcagtgagccgagatcgcacaattgcactccagccgggcaacaagagcaaaagtctgtcaaagtaaataaataaataaataaataacaaaacaaaaaaaaaactatcttgagtttaaaagccattcatctggtcattgacttaacaaatatttattgtgaatacaaaatgtgccaggaaccactagggcttggaatacttatggtgaataaaactgcccaggttcttggtctcatagagcttacattgaacggaatataggaaacaacgtgaaatgcacaaataaacaaagaatcaaaataattcagatagtgataaaaattatgaagaaaacaaaacctctgtaatgggataacatgatgggagatttcgcgagagaaggagatcagtcatgtgtgtctgctctagttagggtagacaggcaggtctctccaggaggtgatatttgagctgaatcctgtacgacaagaataatgcagccaagcaaaatgctagggaatccaacccgtgtgggttgctgatggggaaataaagaagcaaaggagggatgactggccccgaggtcatcctgttagttaaagcctggacccgaatgggggtctcctgtcactccagacttatcattgtaatataatggagtttttccttagtttctgtaattggcaggttcttgtcttctggagaaacttccttcaaaactgatcttctttcccatacacttttattttatttatttattttttgagacagagtcttgctctgttacccaggctggagtgcagtggcacaatctcggctcacggcaacctctgcctcatggactcaagtgagtcccctgcctcaacagattacaggtacctgccactgtgtccagcacatttattttttattttttagtagagacggggtttcaccatgttggccaggctggtcttagaactcctgacctcaagtgatctgcctgcttcagcctcccaaagtgtttggattacaggcatgagcaactgcgcccggccctttcccatactcttcaatgtatttctttgattcttatttatctaacaaggcactcatgtaaccaacttccgttcatatatattaaaaataatcaggccagacacgatgcctcacacctgtaatcccagcactttgggaagccaaggcaggcggatcacctgaggtcaggagttcgagaccagcctggccaacgaggtgaaaccccatctctactaaaaatccaaaaattagccaggcgtggtggcgcacacctgtggtcccagctactcgggaggctaaggcaggagaatcacttcaacccggggggtggaggttacagtgagccaagattgtgccactgcactccaacctaggtgacagagtgatattccatccccccaaaataataacaatcaaaaacaaagcgcatatgtgtgtgtgcatgtgtgtatatatgtgtgatgggagcttaaggtatatttcctaagcaaaggtaagaccccatctattgggaaagaaaggcaacttgacttcctttattttaatatttttaaaaagaaaagccatgttgcataacaccaagatattttcacctaaaattccagcaaatcttaacagaagaaattctaaggtgcttagaggtaactgaaaaaaatgtcactatctttatggctccaacctaacaatgaagctgagtgtgtctactctcagcttgaatgaaataaaatggcaaccacaaccaaatgaccttgctcactttatgctagttacatcttgctctgttgttgaaaaaaaaaatgctcgggctggcccagagcctaagatgtgatccacagacaccccacgccaccccccaagatcgtacgagtcataaagaagtgactggaagagctgtgctctaactgaatcaagagatagggagggagagaggggactgtgttaccgtaaaaattctttagatttaatatcgtttgggaaaatttttctttgttggtttgctcctagaagcagatcccatgcatttcttttttccagttctattaaatccctaaacagagctgagttttaagggcttagggctgcccttgggaaataggtgattatactctctgcttagggttttagcgataagaaaaaaagaggcagtggattgaattcccctcccccagggcaatttcttgactctcttttatagttccccgttaaagcagacacatatttaaaaaatgaagtggtgacacatataaaatcccatccatcaatctgcacttttcaattgttatgtatatatgagaaatagatagacaaacagatggagagacggatgtacacagctgaaagactagttagttctttagtaagaggctctacagaatattttcctttttgttttttttaatgtttcatgtaattatttcacaaggggtaatcgcttgggaatctttaccctacagaaatattacaagtgtaattgagaggatctggggaaaaaaaatcagtactctctctaaaaataaatttaatgaatcaaactctactcctataaatgtgtttctcaaactggaactctaagtccctcagaatatggccagagatggagtgatttgttcattacttctaggaagggtattcaacaattaatatggcttggacctcccccttccgccatggctggaccttgtcccccacataacttcagaccctccttactgctacaaaacattgccaattttgtcactgctcctttcaattcttcctcaataaacatatgtaagaagagactgaaatttgagaaacaaaatcaaatatcagggaactctgcaaagtgtgtcataccaaaagaggcctaagaagtgatacaagccacataccaagtgccacttactgtttttccaagaagcaaagtaaataccaggaagttaaaggacatgactaaattgccctactaggtagtatcagagccagcactagaaccttcaatacccaatcccctgaccagtactctcatacagtatcactacgaataagtatagtaagtaggtataatacagtatgactatatcactccttctttatttattatttgttgtgaaggctaagatggaaaaaatgaggctgttagggtaatttcctatcaaaaagagtgacagaatttagaagcagtgctcttaaagatgggaatgtgctcacttttccctgtctgctataccagctaacaaagtcttctgtgacctagaagatcgaatgcaattacattgcccatatatatttgctatgctgtttgagtctcccaagggcagcataacagtacaaagggagtgacatctttatgaggttaacccttttctattttaagggtagactactgaaggcagatgtgttccatggagtatagcaagaatgcttgaaatttggtagttagaaggaatgacagcatcacccaggagggaaaaaattaatcgctgtttagaggaacagtgatctgaggaagcctaggagaatgttgatgcacatgaagtgaatgtgaactgacaaagagggaatttgtatgaattataatacattgagaagagacaaagagaaagcaggaaaactgtttgttaagctgtgccatgtaccaaacaaaactgtaggctatttcataaactgtattatctcatttaatccccacaaccttttgagacagctactattatcctgaaaagcagagttatgaggctcaaagacgttaagtaaccagtccaagataacacagctaatgaaatagagtcattttccatgctaaaattttccagctctgattctgttaaacttttctacttacaaaccaccccaaaagttagtggcttaaaacaatgacgcaatatttctcataattctgtggattggctgggcagttcctctgctggtttcacctgggctcacttgtgtggccacattgagctggaagattggctgggtccaagatggcctcacttgtgtgtgggcagttggtgctgattagagtcggggcaccttggttctctgcatgctcatctcccaattagctagactggcttccttacatgttggtatcaggtcggtgttccaagagggcttcataaaggccatcctcagaagtagcacatgtcatttatgtcacgttattggataatgcaagtcacgaggccaatcgagattcaagggggaaaaaagcatccattttttgatgccaggagtggcaaagttacattacaaaggggcgtgtggggtggaagggatcattgtgatcatttaaaaagccatctaccagccaggcatggtggctgatgcctggaatccagcactttgggaggctgaggtgggtggatcctttgagccctggagtttgagaccagcctgggcaacatggcaaaacactgtctcaacaaaaaaatactaaaattagccaagggtggtggtgtgcacctgcagtcccagctactcagaaggctggcggggaggatcacttgagcccaggaggcagaggttgcagtaagcagagattgtgccactgcactccagcctgggtgacagagtgagatcctgtttcaaaacaataaacaaaaaagacaatctaccacaggctctaaactccatgctactcttactaccaaaatattaataaaaataccaaatttcccctaactgttctttttataggtttattaaaaatccttaatcaaatgactactttttataacctggaatagatgtcaggaaaacttgggctgtagtccaagatctattgctatgggttcttggaggctttctctttaataaaaaaatgagctttaaggccaggcgcagtgcctcacgcctgtaatcccagcactttttggaggccaaggtgagtggatcacttgaggtcaggagtttgagaccagcctgaccaacatggtgaaaccccatctctactaaaaatacaaaaaaaaaagaaaaaggaaaaaaattagccgggcgtggtggtgggcgcctgtaatctcagctacttaggaggctgaggcaggggaatcacgcgaacccaggaggcggcggttgcagtgagccaagattgcactgctgcactccagcgtgggcgaaagagtgagactccatctcaaaaaaaaaaaaaaaaagctttaatttcttcatttacgaaaagaggatttggtctgtcttctctctaagggcttatacaactctataaattgcagaatagtgtcctatttttagactaatatgaactggccctctagggggatgggcaggatagagatgagagaaggctagaaatgagatggcttctgttttgcaactcactctctttcattgctgtgggtgcagaatttgggaggcagtgagcaatcagaactccttcccatgtgtggttgtaatcttatatgatctgggtgctactctgttttcatttattatatgctaaagtagcatgggtcctccagcattgtaccaaggattaaagtacaagtcatcactttaagggcttctagacctggttagacaaaacaattcccatgcaacacgcactcacactagctaagcagatcggagaggtgaaagggctcctgagccagtatcttcctgagggaaatgcttagctgggagctcgctctctcagaaagatattgttgcctagtctatggaagatcaggttcccaaggagaaaactaatgtttaatttagcacaaagacagctcagagtcactctctgggggactgagcctgcaaacagatccacatgcaaagaatctaagggagaaaaggaagctctctttggtgcaatggctctaggacttgggcccaaactttactaaacggttgcctctgtctgttgtttctgtcaggatagctcctctttcctgtttactctcatctctgcactttgcactttaacacttctgcgaaacaaccaaatgggataatacactagcacatactttgtgctgtctgaaattaagtagcacggtgtggcaatcaaatgcgcaagacttagccggtttagcaagtatcagaaacttaggtgaacagaaacatcaacaacaacaaaaaatcctcatttctcagctgcttagccagagaatgtttttatttttacataatttagactccagtgacctccagatatgagcattttacacataagtaagacacagtacagtacatattgtattcaattaagctacttctttgcaccctggttaccaggactctaagagatactgtgtatccaacagactcccggtaagttattagaggttgtagccgacttttgccttaactgaattttcttagaaacagacatgtaattaactttctactgaaatctatgagagctacctgaaaagaactctgttgtacaatgaggcatttaaggtgttgggcttcatgtgggtgacagttattagagggctggataagaattacaaatataactcagccacatttctgacaaaagagaaattttaaagcaaaaatgttaatgattccatgttaatgtatgaatctgccagaatgactcaggaagcaagaacactgttaaaaacaaaacaacccaactatgtttgacactacatttcctaagcattattatcctcaagaaaggggaggaatctaaggttaaatcatggggagtaagcgaaaaaaaaaaaagataaaaatttttgactacattcttggctctgagtttggacaataaatccatccttgcccaaatataatctactaaagaatggagactatttgttttctaatcctgtcacttcatagaaacaccatgctttcaattaagaatcgtcatcaataaaacttgctttgaacccttggcaacatcttcctcatgttttttatggaaaaccgcacttgaggaggtactgagtaaagagattctgaggtgagagccacatcaaggcatggaaatttcaacatgctcctgcttagggttggaaagacggcaaatctgtgttgcctattcatctgcagatgcagtaaattagcaactttagccagggatctggctttcaaaagcataaatttaaatctccacagtaggaagcgtctaaccttttgtggctctaggaccaaattcacttaagaattattcattaatttcaattaataattcaattaaattggtaagtttgtctatttggttccaatgattcaaaactcccaatagatggtttaaatttctcatttacctactaagcccacactccacacttgctgggtaactgaatggaaacccagactgaattctagaagtaaggagtcaagaggacattcactctattcaacttctagattaggagtcctagaatcttaggattggaagaggtagtacttggtcccattctcaagaaggacactatttaacattctagggagatggaaatctatcccaggtgatgtctccatattcaactattgagggaactgataatatgatactcttcactaaccattttaagtaaacattaaagagaaaagccatgctcttcctctaaatgtctgatgcattactggaaacacaattctgggctgggaaacctatgaatctgattcaggtatgttacttcacacactaataataacagctaaaatttattgagcctttacgaggtgctaggcaattgctaaatttaatcaacagctctaagatgttagttctattactatcactccatttcacagtcgagaaaactgaggcaagggaatttaattgacctatccaagaaaacacaactaagtgttagaggggtgatttgaaatctggtcgtctcacctcagagttaagagttaagatctcaggctcttaactgctatgcttctttgcctccttacacaagccaactgtaacagttctatttctaaccccactcacctcccgtctacactgtaaattcaaagagggcaaaggctatactgaagtgtccatcaatgtattcctggcacagttcatggcacagaagagctgtacaaagattatttactgaattaatgaatattttcccaaactctaaaaaggacccatgcatacaatcttgacgtaagagtttaaaacctttgctaaaacattaagacctttggagagctgtagcatgtgtcagtattgccatttgcccattttcatatccattccttcagtaatttggctatggtagggtccagctctctagttgtcctcaacctgtggagaatatgtgaacttctctcttcatgtcctctatagggaagtggaatagcttttgctcttttacctctgtttctcacaaatgtgtaggccaaggttgaagctagtcaatagcccattcactaccgtcagcatccaagcatcatgccatgaatcagggaggagggagatgttggcttttctcctttgccatctttccttagggtcccttacttttcccttgtaaacaagaactaaatgggggaaactggtatccaactggaccttaaggcaagtaaaaaatttgtaacacatctgtattacaagcaaggaaataagtacatctcaaagaccatctaaaataatgcttttctcacgaatttttgttcatgatttttttaataatgagaataccttttccacattagtatacaggcaaactcatttgttgggaagactgatttacacatcaagagagtataaacacttttaccaacagggcatttcttgtttgcactggaaggcccagtgaacctaagaagcgaggtatagcttggtctgcttcttttacttcctcttctgcatctagctagtgtgctttaaaactatgtccttttagtgtcaaagggcatgtcatgcagtatataactcaccatgaatgggagaatgtgtaaatagcaaggcattaagcagctcaagggacttgaagatgggtagtacagagcacttaggcaatgcgctgtgagaagaggctgctggaggggaaatgtaatacttgtcttcaagtatatgaaggattattattgcatcatagctgttgattccttggagccgtccttgctctaccattttccagggcttctgatttgctcttaccggatctccaggccctccaggatgtggatcaatctcatttgtccccctcagtactcacgtccagccacactcagtcaagcactgctctgttccccaaacacttaacttacatgcctgcactcagcgaccccaatcccacatttccgtattttctccctcttctcaggccctgctggtgacccatgttctcatatagctatccctggcctatatttgaatctctctactaccaactactagtggtactcatgttttgagcacctactatgtatcaggcactatgctgactgttttgctaaataactttagctttattttgcagatgaaaatactgatgccaagaaaataacaaaattattttctcatattcatacagctagtaagtataacatagggacctgaacatggtctaactataaaatctatgcattaaattattcaatttaagcttcagtttccttatatgtaaaatgggacaaatgttgattactcacctgttttttgcaggccttacataaaatatgtaattaaaaagccttgtacattctaggactcagtaaatatttgttcctctcttcctctgatttttctatatcagttttggtccattctacctggttagtacttttcctgttactttattgaagtggttttgcataccattaggctgtaagtaagcagggacaatgtctttagctgtatttctccttattctcccaggaagcctgctggagtgtgacggaaattagcatgaaaatgcaaaataaaaaatttagaattgttttcactaaacattgccctgcctgtgaacataaacatatataagggtctggattaaagaacaagaaagcagtagaatccattcagaaaggcttagctgccatggatagcagaactggatgactgttttcagattccctttcaggctttcttagattaaataacagtgctaaacacaaacacaaacaacaacaaaaaaacaaaaacagctaattatggccactcttttagtcatatttaaattggtatgtctaagaacatctgaaagcccatatttaaacatattggtatttaaaaatgtttacaatacagaagccataagtgattaaacattacgatttagaaacatttgatgaacatcacctaccaatattatttcaaagaaagcagatgccttctataaacaaacattgtcctaaacaagcaagatatcttggtttacatgataacatcaccttgatgtcaaagaaaggtttttatcaattttttgtaaagtattatactaactcctctctccacttgaacccttttgcctttgtgagatcttataattatatttacttgaaataagtggtaggaaggtcctagatagataagaattctcctttttttttactttgttctagaaaacagaacgaaaataggtcagtttttaaggaaatgatggctgcatatataaataatataaacactcctatcactgtcctaggaggacatttatcatgtagacagccatagatacccagatctggcctcccacttacagctctcaactttttaattgtcaattggaaacttgattattatcagttaaaaataaccagggtactctggcaatgatttaacttgtttgactttcttaagctaacaattaacattttagacaattgttgacaaaatatttaactctcccatgcatttgtgtaaacaacttttctaatatgccttagatgttctgggggacacatctttccaaagcttcccaggtccatgcagaggcctgtaaagtagatgcattcaaagactccaaagactttcatagcattgcactaggatttcctgggaccttcaggaacacttaagtatacggatacgtcagtcttatcttgacagcagtaaatttgaaatgccaatccctctatttacaataagtgctatttcatcatttaaaaccgacaactgaaagctgagtatacatttaactcctagaagaaccagtattatcattcattgtttagaagtttattactactaacactagtattgcattttggcagtgcttaatttttcctaaagcttgttcagaaaaacacgctcatttgcttctctcaacaagctggggcagcatgattgtcctctctgttccacagatgactgctaagtgacttgtcctaggtaacccagatggtgatccagcaggcacaaaaccaagggatgtaggctccttgtctgatctactttctttcctccacatgacattagagaaaagataatctctgaagccagagatgacatggaaccacttatctagtgatcctagcaacacaatctatgcaacagaaaaagagcttgtctcaggcaaaagggaaagattaataatgtaccacagaagctctaaaccttactgttccatggaccagcaattattcagtttcacagttcattcaaagattcaaacatacttcaccagaaaatgagttagtgcctaaagtctgctccaagtggttagaaatgcagatctgctcaaagccctataatccgggccctctgaaaggccctgttcctgcagactctgcagcagcggggcttcccctgaacttgtacttgagctaaatgaagaaactggctgagtaagggctgtagaattaggctgtcaatgtggacagaattaaaactggcttggaggttattcttgcattgttcttgaaacttaaggctattgaaaggattcagacattatatattccttgctgtataatacccatgaaagtcaacattatcccaccaaacagaagttgtcctttcaccttcattcaacaaatattacccactgtcttcaaggcattgtactagaaggtatgcaggatacaaagctttcatctgaggacacagcacatctttgattttagatgatcaatattctctccctttctccaaaggacatttatggccacttatggcatacgaattaactattaaagttatacattcaacacacctaagtcacataaatctggttatggacacagtagcaataaaattaagaaaaaattctgacactcaccctgaacaaaggcccttttaaaattaatagcatatctgaaaaataagaggagcccgagtaaagtgagacctgccaatgtaatgggcttggtgaatcacttcaaaatgcccaggcctccctttggacacaatgttatcaggttaatacagcacttgcatcaccatctctgagtaccgtgctgagtaacaacgggccaaatttagcagctaaaatggagagggaatttccaacaacccgtgcaatgccacatattctcagtgaaaagcaactactagaaatatactatcccttaccctcctaacttaaactgtgcctctctgcatcatcactacacctggagagggagctcctctaagggaatgtctcaggagatggctggtggttagaagagagaaagattccctcttaggccagaggtagcacagcagccagctatggcttctgcagcagtaagctttcagtcgggaagggccagacaccgctccctcacttccctcccagcatgggtattgctactgtaaagttaccacgaccactaaagttggtttcatttcccatcatgaaacaccctagaaaaaaaaggctgtctcagcttactgccaagttggacaaaagcagaagctcaaagaacaaggccagaggcaaacatgccacctttccttcagaggctgggctgtgaaggccacaagggaagcccactgtggctcttcacggccccgctccggccttgacaccccgggcagagatcagtcttctccactcagggttgggccgggtgcctcacttgcggttccatccccagaaacacttaccaggagactgtgaagcacacaaagccgcattattgggagacttgcagacagattataaatttactggggacaatcaaggcatttagatacttttggctacagatgctggtgacacacacatacatacaaacctcattcttctctccatttgagcgattctttacccccctcctttaccctaacatctcttttttcacaaaacaacctcccactgctttcctagggaattccagggagaagcgggaatagagcaggtggtagaaaaaggatattaggcttcgaagctctaatacaaccccacaagctagtgctgctattcaagggtaaaactgtaaaccctgtgcagtttaactgttggtagttatttttcatctggagctggcctcaaggagtcccattcctaggtagcccaagtaaatgtgcttatggctggggagaaaagcaccatcctactccccagagattcccagggtcttcgtcaccatggacccaggccagggattaagggaagccagaaagagccatcctgagcgtctggccagaggatgtcctctcccgagagctcaatatcaagctcctttggaggagcagttagacacaatagcaccatctcctttgggctttttgagtactttggggcttgcatggccatttcctgtcgcttttgctagggctgacctgggtaaactggagcagacatagaatccagaagtcccatggagctccaaaagggaggaagcctgcagggccacagggcagggttctaccttccaccagaggccactggtccagcagctttggggggaagcctgcaaacagcaggcagtcacctgaccaggactggcactgagaatcaatgatccaagggatactcctctgggatggtgtgtgtctgtgcctctggggaagaacttccagccagaaacttaatcagaacttttgggtttgatatcctatcaccaggagtggctgaagacaaggtatttcctaggatgatgatctgtgtaaatagctgcttcgtgcctgtctgcttaacgaatgctctaagggagcattactggattggactggagtgcttgggaaaataatcgagatgtggctcaggagtgagagagtctagagggaatcagagagtaggcctcttaagaaacagtgcctccctagtctctctttgggatattttccccaaattttgtttttgactgaggggacattcggggaatttgctatttgttacagcttaccatttatgttctcttaagcgaagaagaagggggtcacttcaaaagggagaggggaaatggggcaaggagaaaaaggctttaataaaggccagctgggctgataaatgctttggggctgaaaaatggcttgggggcctaatcagagctggctggccaaagctggaggatccatgagatagaaccttcctcagtggctcagatcttgccagctggtagcctcttcttttataagatgtggaccccagagagcctctggaaaactcaggcttcttatcagttaaggaatatcctataagcgaaggaaaacccaggagtgagcaccaacagaacatgatgagtaggcgcatgaaaccacccgaacacacccaatggcctttaaggtagtcaggtgacatcttggcctttttcattgccatccactctaccttaggccaaagcaaactctaccctcacaaaaggtcacaggaccacagccagaaccatgagaaagccaggtgcttaccgcaatcagggctgagttcctctggtcccctggggttgaagcgggcggctgctgctctccgtttatcccaccactgccaccattattgctactgttcagcaggtgctgctggtggtgatggtgatagtctggtgggggcggtggggctgctgttgctgctgcttgggaggccgcaggaggggcagcagggggcggtggaggggctgtagtggtggcagcagtggcggtggccttggtgtgtttgccagctttccttgccccctggccatgctgtacaaggctcaggagctgcaaggtgctttctctttcccggtctgagctctcggccctacctcgttcatatcgtccttcacagctcaggtggtgttggcggcagacagcgatccgagcccggaggcgctccacgatagcactgtgcactctcggggtgactgagccccctccaaggagccccgccccagaggccccccctagccctcctgcgggggcctgcgggggcgctgtgtcccccatcttaccggacacaatgattgctgcctctgggatggtgaggtggaaagaggctactgctggctattgcaggcaagtctgtttttgacaatgtgagctcagtgttcagggccacatgaatagaggtcttcagaggttgtgggggagccgtggagaagttgtgggggaggggagttagtaaaaagagggtggggagaaagaatagaaaccaactggggggaggataagttggaaacaaaccctgattaacttactctaattgcatttgacagctctggagaagttggacagagttggtggattttttttcctccaccaagctgacaagagccactaggtactttgtaaacacacgatctgggggttagatcaagaattcagggattgtccagcaagagacagaaacacacagcaaaaggtattgagagaggtattaatagagaggactccccctcacctagttgtttccgacaattctttatggggatgtttctgcagagaaacacatttctaccatgtctatgtaaccagcagccttgacttttcctcaggttaaataaaaaaccaaaacaaaacaaaacagtgctgtttcagaagatgtttaagtcactgttcaaaatgtgcaaaaatcaagggagactgtcttttggcttttaatttttcctccctttcctttcgctccggtgttttctcctctttggggtactgtaggatgttgtcttctcccaaaagagggagacagcttttcaactgttaacaatgtcagtaattggacttttggaccatgcttttttcttcagctaatccaatcaccggtaaaatcctcactccctctaaggtttcctagccttaaatgaaaagcaatcttaagtcgctagccactgagagagatccttcaacacatttttttctttcccgcttacgtttctattcctcacccccggctctattctaatacagtatcaagagagacaaactcttccgagagtaatttacaaacgatggtcaaacttacaaacttccagcaaattgcaccgagtcatgtccagccacttttctgtccacttttgtacattccatccccggccagtggatctgagggtctggactcgcaataagcaatctggttctatctcctgtatttgctccgctttatagatggaaaaaaaaagtagcttgtattttcctttctctttctcgtctgttgttagccgctttgctgacactggctcgcgcccggagtcacggcgatacacaggctttcattgtgctccgataggagagggagagaaagagagagagtgagacagagaaggagaaagagagagccagcaagctgcagatgggggtgggggggcggggagagggcgggagagctcgttcgaggctccctggtggaaggctggtgccactgcgcgagtgagtaatcgcagccaggcaccggggaaaggggaacgcagagggcctcccagtggctgaagaggtaaatcccaagccctgcgcatctcagctgccctggctcagctcagcatcagactcggttaagcggggaaggctggggaaattccccaacctctacacaaccatttcaccagctctaaatgtttaagaaattccgggccaggaatgtgttttccctttcagccctacattacgccccgctgaggatatcattttcatttttcagtatattgtaaatgacaccactgagcaacctagcacgagctgtgtgagcaccgaggaaatgttcattaatagaataaggaagatatgaatgtgtgtgttgagggcggaaggggttgcgcgtggagaggagaggtaatcacattgttagctcctaaagggcaggcaggtgtagcgtttgtctacctgcctgcccatttgtgtgtctctggataagtgagtctgggtgatcacaggcaaatcagttgggataaataaaatattttatgagaatgatacaattatcgataccagttctagaaaaaaacgctttttttttgggaatgcatgattgcctatgaaaaaccaaatataagacctgaagtatccttagctacctggtgcacatatacaatgaggaaagtcaatgtgtagcagctgagtttcaaaaagttttttttttttttttcttttaatggagtcttgttatgttgcccaggctggagttgaactcctgggctcaagtgatcctcccacttgagcctcctgagtagctggaactacaggtactcaccactactgcacctggctctgagtttcaagaagtttaataatagaaaccaaatagatctcacacagatcattgttcccccattttcaagtgatccaacctttaaaatatccaatcctggccaggcacagtggctcacgcctgtaatcccagcactttgggaggccaaggcaggtgtattacctgagttcaagagttcaagaccagcctggccaatatggtgaaaccccgtctctgctaaaactacaaaaattagctgagcatggtgtcatacgcctgtaatcccagctactcgggaggctgagacaggataattgctggaacccaggaggcggaggtcgcagtgagctaagatcacgccactgcgctccaacctgggcaacagggtgagtctctgtctccaaaaaaaaaaaaaaaacttattgtggattctgcttattttcaattatgaagattaaattaaggtgagcataatactgcaacagtcaggaccaaaaatattctgggtatcctaatttggaagtcatttggatttgaggtctcaaataatatacc
